United States Patent Application Publication US 2026/0347851 A1, published November 5, 2026 (application 19/736,753).

The application's sequence listing, which the Patent Office published only in electronic form, follows.

SEQUENCE LISTING (621 sequences)

SEQ ID NO: 1 - DNA, 6431 bp, Homo sapiens
  source 1..6431: mol_type = other DNA
gtaagtcaacaatgtcctgggattgggacacactttctgggcactgctggccagtcccaaaatggaacataaggaagtggttcttctacttcttttatttctgaaatcagcagcacctgagcaaagccatgtggtccaggattgctaccatggtgatggacagagttatcgaggcacgtactccaccactgtcacaggaaggacctgccaagcttggtcatctatgacaccacatcaacataataggaccacagaaaactacccaaatgctggcttgatcatgaactactgcaggaatccagatgctgtggcagctccttattgttatacgagggatcccggtgtcaggtgggagtactgcaacctgacgcaatgctcagacgcagaagggactgccgtcgcgcctccgactgttaccccggttccaagcctagaggctccttccgaacaagcaccgactgagcaaaggcctggggtgcaggagtgctaccatggtaatggacagagttatcgaggcacatactccaccactgtcacaggaagaacctgccaagcttggtcatctatgacaccacactcgcatagtcggaccccagaatactacccaaatgctggcttgatcatgaactactgcaggaatccagatgctgtggcagctccttattgttatacgagggatcccggtgtcaggtgggagtactgcaacctgacgcaatgctcagacgcagaagggactgccgtcgcgcctccgactgttaccccggttccaagcctagaggctccttccgaacaagcaccgactgagcaaaggcctggggtgcaggagtgctaccatggtaatggacagagttatcgaggcacatactccaccactgtcacaggaagaacctgccaagcttggtcatctatgacaccacactcgcatagtcggaccccagaatactacccaaatgctggcttgatcatgaactactgcaggaatccagatgctgtggcagctccttattgttatacgagggatcccggtgtcaggtgggagtactgcaacctgacgcaatgctcagacgcagaagggactgccgtcgcgcctccgactgttaccccggttccaagcctagaggctccttccgaacaagcaccgactgagcagaggcctggggtgcaggagtgctaccacggtaatggacagagttatcgaggcacatactccaccactgtcactggaagaacctgccaagcttggtcatctatgacaccacactcgcatagtcggaccccagaatactacccaaatgctggcttgatcatgaactactgcaggaatccagatgctgtggcagctccttattgttatacgagggatcccggtgtcaggtgggagtactgcaacctgacgcaatgctcagacgcagaagggactgccgtcgcgcctccgactgttaccccggttccaagcctagaggctccttccgaacaagcaccgactgagcaaaggcctggggtgcaggagtgctaccatggtaatggacagagttatcgaggcacatactccaccactgtcacaggaagaacctgccaagcttggtcatctatgacaccacactcgcatagtcggaccccagaatactacccaaatgctggcttgatcatgaactactgcaggaatccagatgctgtggcagctccttattgttatacgagggatcccggtgtcaggtgggagtactgcaacctgacgcaatgctcagacgcagaagggactgccgtcgcgcctccgactgttaccccggttccaagcctagaggctccttccgaacaagcaccgactgagcaaaggcctggggtgcaggagtgctaccatggtaatggacagagttatcgaggcacatactccaccactgtcacaggaagaacctgccaagcttggtcatctatgacaccacactcgcatagtcggaccccagaatactacccaaatgctggcttgatcatgaactactgcaggaatccagatgctgtggcagctccttattgttatacgagggatcccggtgtcaggtgggagtactgcaacctgacgcaatgctcagacgcagaagggactgccgtcgcgcctccgactgttaccccggttccaagcctagaggctccttccgaacaagcaccgactgagcaaaggcctggggtgcaggagtgctaccatggtaatggacagagttatcgaggcacatactccaccactgtcacaggaagaacctgccaagcttggtcatctatgacaccacactcgcatagtcggaccccagaatactacccaaatgctggcttgatcatgaactactgcaggaatccagatgctgtggcagctccttattgttatacgagggatcccggtgtcaggtgggagtactgcaacctgacgcaatgctcagacgcagaagggactgccgtcgcgcctccgactgttaccccggttccaagcctagaggctccttccgaacaagcaccgactgagcagaggcctggggtgcaggagtgctaccacggtaatggacagagttatcgaggcacatactccaccactgtcactggaagaacctgccaagcttggtcatctatgacaccacactcgcatagtcggaccccagaatactacccaaatgctggcttgatcatgaactactgcaggaatccagatcctgtggcagccccttattgttatacgagggatcccagtgtcaggtgggagtactgcaacctgacacaatgctcagacgcagaagggactgccgtcgcgcctccaactattaccccgattccaagcctagaggctccttctgaacaagcaccaactgagcaaaggcctggggtgcaggagtgctaccacggaaatggacagagttatcaaggcacatacttcattactgtcacaggaagaacctgccaagcttggtcatctatgacaccacactcgcatagtcggaccccagcatactacccaaatgctggcttgatcaagaactactgccgaaatccagatcctgtggcagccccttggtgttatacaacagatcccagtgtcaggtgggagtactgcaacctgacacgatgctcagatgcagaatggactgccttcgtccctccgaatgttattctggctccaagcctagaggctttttttgaacaagcactgactgaggaaacccccggggtacaggactgctactaccattatggacagagttaccgaggcacatactccaccactgtcacaggaagaacttgccaagcttggtcatctatgacaccacaccagcatagtcggaccccagaaaactacccaaatgctggcctgaccaggaactactgcaggaatccagatgctgagattcgcccttggtgttacaccatggatcccagtgtcaggtgggagtactgcaacctgacacaatgcctggtgacagaatcaagtgtccttgcaactctcacggtggtcccagatccaagcacagaggcttcttctgaagaagcaccaacggagcaaagccccggggtccaggattgctaccatggtgatggacagagttatcgaggctcattctctaccactgtcacaggaaggacatgtcagtcttggtcctctatgacaccacactggcatcagaggacaacagaatattatccaaatggtggcctgaccaggaactactgcaggaatccagatgctgagattagtccttggtgttataccatggatcccaatgtcagatgggagtactgcaacctgacacaatgtccagtgacagaatcaagtgtccttgcgacgtccacggctgtttctgaacaagcaccaacggagcaaagccccacagtccaggactgctaccatggtgatggacagagttatcgaggctcattctccaccactgttacaggaaggacatgtcagtcttggtcctctatgacaccacactggcatcagagaaccacagaatactacccaaatggtggcctgaccaggaactactgcaggaatccagatgctgagattcgcccttggtgttataccatggatcccagtgtcagatgggagtactgcaacctgacgcaatgtccagtgatggaatcaactctcctcacaactcccacggtggtcccagttccaagcacagagcttccttctgaagaagcaccaactgaaaacagcactggggtccaggactgctaccgaggtgatggacagagttatcgaggcacactctccaccactatcacaggaagaacatgtcagtcttggtcgtctatgacaccacattggcatcggaggatcccattatactatccaaatgctggcctgaccaggaactactgcaggaatccagatgctgagattcgcccttggtgttacaccatggatcccagtgtcaggtgggagtactgcaacctgacacgatgtccagtgacagaatcgagtgtcctcacaactcccacagtggccccggttccaagcacagaggctccttctgaacaagcaccacctgagaaaagccctgtggtccaggattgctaccatggtgatggacggagttatcgaggcatatcctccaccactgtcacaggaaggacctgtcaatcttggtcatctatgataccacactggcatcagaggaccccagaaaactacccaaatgctggcctgaccgagaactactgcaggaatccagattctgggaaacaaccctggtgttacacaaccgatccgtgtgtgaggtgggagtactgcaatctgacacaatgctcagaaacagaatcaggtgtcctagagactcccactgttgttccagttccaagcatggaggctcattctgaagcagcaccaactgagcaaacccctgtggtccggcagtgctaccatggtaatggccagagttatcgaggcacattctccaccactgtcacaggaaggacatgtcaatcttggtcatccatgacaccacaccggcatcagaggaccccagaaaactacccaaatgatggcctgacaatgaactactgcaggaatccagatgccgatacaggcccttggtgttttaccatggaccccagcatcaggtgggagtactgcaacctgacgcgatgctcagacacagaagggactgtggtcgctcctccgactgtcatccaggttccaagcctagggcctccttctgaacaagactgtatgtttgggaatgggaaaggataccggggcaagaaggcaaccactgttactgggacgccatgccaggaatgggctgcccaggagccccatagacacagcacgttcattccagggacaaataaatgggcaggtctggaaaaaaattactgccgtaaccctgatggtgacatcaatggtccctggtgctacacaatgaatccaagaaaactttttgactactgtgatatccctctctgtgcatcctcttcatttgattgtgggaagcctcaagtggagccgaagaaatgtcctggaagcattgtaggggggtgtgtggcccacccacattcctggccctggcaagtcagtctcagaacaaggtttggaaagcacttctgtggaggcaccttaatatccccagagtgggtgctgactgctgctcactgcttgaagaagtcctcaaggccttcatcctacaaggtcatcctgggtgcacaccaagaagtgaacctcgaatctcatgttcaggaaatagaagtgtctaggctgttcttggagcccacacaagcagatattgccttgctaaagctaagcaggcctgccgtcatcactgacaaagtaatgccagcttgtctgccatccccagactacatggtcaccgccaggactgaatgttacatcactggctggggagaaacccaaggtacctttgggactggccttctcaaggaagcccagctccttgttattgagaatgaagtgtgcaatcactataagtatatttgtgctgagcatttggccagaggcactgacagttgccagggtgacagtggagggcctctggtttgcttcgagaaggacaaatacattttacaaggagtcacttcttggggtcttggctgtgcacgccccaataagcctggtgtctatgctcgtgtttcaaggtttgttacttggattgagggaatgatgagaaataattaattggacgggagacagagtgaagcatcaacctacttagaagctgaaacgtgggtaaggatttagcatgctggaaataatagacagcaatcaaacgaagacactgttcccagctaccagctatgccaaaccttggcatttttggtatttttgtgtataagcttttaaggtctgactgacaaattctgtattaaggtgtcatagctatgacatttgttaaaaataaactctgcacttattttgatttgaa

SEQ ID NO: 2 - RNA, 21 nt, Synthetic construct
  source 1..21: mol_type = other RNA
cctgagcaaagccatgtgatt

SEQ ID NO: 3 - RNA, 21 nt, Synthetic construct
  source 1..21: mol_type = other RNA
ctgagcaaagccatgtggttt

SEQ ID NO: 4 - RNA, 21 nt, Synthetic construct
  source 1..21: mol_type = other RNA
gtggtccaggattgctacttt

SEQ ID NO: 5 - RNA, 21 nt, Synthetic construct
  source 1..21: mol_type = other RNA
ccacagaaaactacccaaatt

SEQ ID NO: 6 - RNA, 21 nt, Synthetic construct
  source 1..21: mol_type = other RNA
cagaagggactgccgtcgttt

SEQ ID NO: 7 - RNA, 21 nt, Synthetic construct
  source 1..21: mol_type = other RNA
agaagggactgccgtcgcgtt

SEQ ID NO: 8 - RNA, 21 nt, Synthetic construct
  source 1..21: mol_type = other RNA
agaagggactgccgtcgcatt

SEQ ID NO: 9 - RNA, 21 nt, Synthetic construct
  source 1..21: mol_type = other RNA
gctccttccgaacaagcattt

SEQ ID NO: 10 - RNA, 21 nt, Synthetic construct
  source 1..21: mol_type = other RNA
ctccttccgaacaagcacttt

SEQ ID NO: 11 - RNA, 21 nt, Synthetic construct
  source 1..21: mol_type = other RNA
cttccgaacaagcaccgactt

SEQ ID NO: 12 - RNA, 21 nt, Synthetic construct
  source 1..21: mol_type = other RNA
cttccgaacaagcaccgattt

SEQ ID NO: 13 - RNA, 21 nt, Synthetic construct
  source 1..21: mol_type = other RNA
ttccgaacaagcaccgacttt

SEQ ID NO: 14 - RNA, 21 nt, Synthetic construct
  source 1..21: mol_type = other RNA
ccttccgaacaagcaccgact

SEQ ID NO: 15 - RNA, 20 nt, Synthetic construct
  source 1..20: mol_type = other RNA
ccttccgaacaagcaccgac

SEQ ID NO: 16 - RNA, 21 nt, Synthetic construct
  source 1..21: mol_type = other RNA
tccgaacaagcaccgactatt

SEQ ID NO: 17 - RNA, 21 nt, Synthetic construct
  source 1..21: mol_type = other RNA
cgaacaagcaccgactgagtt

SEQ ID NO: 18 - RNA, 21 nt, Synthetic construct
  source 1..21: mol_type = other RNA
agcaccgactgagcaaagatt

SEQ ID NO: 19 - RNA, 21 nt, Synthetic construct
  source 1..21: mol_type = other RNA
gcaccgactgagcaaaggttt

SEQ ID NO: 20 - RNA, 21 nt, Synthetic construct
  source 1..21: mol_type = other RNA
caccgactgagcaaaggcctt

SEQ ID NO: 21 - RNA, 21 nt, Synthetic construct
  source 1..21: mol_type = other RNA
aaggcctggggtgcaggaatt

SEQ ID NO: 22 - RNA, 21 nt, Synthetic construct
  source 1..21: mol_type = other RNA
ctggggtgcaggagtgctatt

SEQ ID NO: 23 - RNA, 20 nt, Synthetic construct
  source 1..20: mol_type = other RNA
ctggggtgcaggagtgctat

SEQ ID NO: 24 - RNA, 21 nt, Synthetic construct
  source 1..21: mol_type = other RNA
ggggtgcaggagtgctacctt

SEQ ID NO: 25 - RNA, 21 nt, Synthetic construct
  source 1..21: mol_type = other RNA
gaatccagatcctgtggcatt

SEQ ID NO: 26 - RNA, 21 nt, Synthetic construct
  source 1..21: mol_type = other RNA
cctgtggcagccccttatttt

SEQ ID NO: 27 - RNA, 21 nt, Synthetic construct
  source 1..21: mol_type = other RNA
ggcagccccttattgttattt

SEQ ID NO: 28 - RNA, 21 nt, Synthetic construct
  source 1..21: mol_type = other RNA
gtggcagccccttattgttat

SEQ ID NO: 29 - RNA, 20 nt, Synthetic construct
  source 1..20: mol_type = other RNA
gtggcagccccttattgtta

SEQ ID NO: 30 - RNA, 21 nt, Synthetic construct
  source 1..21: mol_type = other RNA
gcagccccttattgttatatt

SEQ ID NO: 31 - RNA, 21 nt, Synthetic construct
  source 1..21: mol_type = other RNA
agccccttattgttatacgtt

SEQ ID NO: 32 - RNA, 21 nt, Synthetic construct
  source 1..21: mol_type = other RNA
agccccttattgttatacatt

SEQ ID NO: 33 - RNA, 21 nt, Synthetic construct
  source 1..21: mol_type = other RNA
gccccttattgttatacgatt

SEQ ID NO: 34 - RNA, 20 nt, Synthetic construct
  source 1..20: mol_type = other RNA
cagccccttattgttatacg

SEQ ID NO: 35 - RNA, 21 nt, Synthetic construct
  source 1..21: mol_type = other RNA
ccccttattgttatacgagtt

SEQ ID NO: 36 - RNA, 21 nt, Synthetic construct
  source 1..21: mol_type = other RNA
agccccttattgttatacgag

SEQ ID NO: 37 - RNA, 20 nt, Synthetic construct
  source 1..20: mol_type = other RNA
agccccttattgttatacga

SEQ ID NO: 38 - RNA, 21 nt, Synthetic construct
  source 1..21: mol_type = other RNA
ccccttattgttatacgaatt

SEQ ID NO: 39 - RNA, 21 nt, Synthetic construct
  source 1..21: mol_type = other RNA
ctgacacaatgctcagacgtt

SEQ ID NO: 40 - RNA, 21 nt, Synthetic construct
  source 1..21: mol_type = other RNA
ctgacacaatgctcagacatt

SEQ ID NO: 41 - RNA, 21 nt, Synthetic construct
  source 1..21: mol_type = other RNA
acctgacacaatgctcagaca

SEQ ID NO: 42 - RNA, 20 nt, Synthetic construct
  source 1..20: mol_type = other RNA
acctgacacaatgctcagac

SEQ ID NO: 43 - RNA, 21 nt, Synthetic construct
  source 1..21: mol_type = other RNA
acctgacacaatgctcagacg

SEQ ID NO: 44 - RNA, 21 nt, Synthetic construct
  source 1..21: mol_type = other RNA
gacacaatgctcagacgcatt

SEQ ID NO: 45 - RNA, 21 nt, Synthetic construct
  source 1..21: mol_type = other RNA
acacaatgctcagacgcagtt

SEQ ID NO: 46 - RNA, 21 nt, Synthetic construct
  source 1..21: mol_type = other RNA
tgacacaatgctcagacgcag

SEQ ID NO: 47 - RNA, 21 nt, Synthetic construct
  source 1..21: mol_type = other RNA
tgacacaatgctcagacgcaa

SEQ ID NO: 48 - RNA, 20 nt, Synthetic construct
  source 1..20: mol_type = other RNA
tgacacaatgctcagacgca

SEQ ID NO: 49 - RNA, 20 nt, Synthetic construct
  source 1..20: mol_type = other RNA
acacaatgctcagacgcaat

SEQ ID NO: 50 - RNA, 21 nt, Synthetic construct
  source 1..21: mol_type = other RNA
acacaatgctcagacgcaatt

SEQ ID NO: 51 - RNA, 18 nt, Synthetic construct
  source 1..18: mol_type = other RNA
acacaatgctcagacgca

SEQ ID NO: 52 - RNA, 19 nt, Synthetic construct
  source 1..19: mol_type = other RNA
acacaatgctcagacgcaa

SEQ ID NO: 53 - RNA, 21 nt, Synthetic construct
  source 1..21: mol_type = other RNA
cctagaggctccttctgaatt

SEQ ID NO: 54 - RNA, 21 nt, Synthetic construct
  source 1..21: mol_type = other RNA
agcctagaggctccttctgaa

SEQ ID NO: 55 - RNA, 20 nt, Synthetic construct
  source 1..20: mol_type = other RNA
agcctagaggctccttctga

SEQ ID NO: 56 - RNA, 21 nt, Synthetic construct
  source 1..21: mol_type = other RNA
agaggctccttctgaacaatt

SEQ ID NO: 57 - RNA, 21 nt, Synthetic construct
  source 1..21: mol_type = other RNA
agcaccaactgagcaaagatt

SEQ ID NO: 58 - RNA, 21 nt, Synthetic construct
  source 1..21: mol_type = other RNA
aaatccagatcctgtggcatt

SEQ ID NO: 59 - RNA, 21 nt, Synthetic construct
  source 1..21: mol_type = other RNA
ggcagccccttggtgttattt

SEQ ID NO: 60 - RNA, 21 nt, Synthetic construct
  source 1..21: mol_type = other RNA
agaacttgccaagcttggttt

SEQ ID NO: 61 - RNA, 21 nt, Synthetic construct
  source 1..21: mol_type = other RNA
gaagaacttgccaagcttggt

SEQ ID NO: 62 - RNA, 20 nt, Synthetic construct
  source 1..20: mol_type = other RNA
gaagaacttgccaagcttgg

SEQ ID NO: 63 - RNA, 21 nt, Synthetic construct
  source 1..21: mol_type = other RNA
gaacttgccaagcttggtttt

SEQ ID NO: 64 - RNA, 21 nt, Synthetic construct
  source 1..21: mol_type = other RNA
aagaacttgccaagcttggtt

SEQ ID NO: 65 - RNA, 20 nt, Synthetic construct
  source 1..20: mol_type = other RNA
aagaacttgccaagcttggt

SEQ ID NO: 66 - RNA, 21 nt, Synthetic construct
  source 1..21: mol_type = other RNA
acaccagcatagtcggacttt

SEQ ID NO: 67 - RNA, 21 nt, Synthetic construct
  source 1..21: mol_type = other RNA
caccagcatagtcggaccttt

SEQ ID NO: 68 - RNA, 21 nt, Synthetic construct
  source 1..21: mol_type = other RNA
cgcccttggtgttacaccatt

SEQ ID NO: 69 - RNA, 21 nt, Synthetic construct
  source 1..21: mol_type = other RNA
ttcgcccttggtgttacacca

SEQ ID NO: 70 - RNA, 18 nt, Synthetic construct
  source 1..18: mol_type = other RNA
cgcccttggtgttacacc

SEQ ID NO: 71 - RNA, 19 nt, Synthetic construct
  source 1..19: mol_type = other RNA
cgcccttggtgttacacca

SEQ ID NO: 72 - RNA, 20 nt, Synthetic construct
  source 1..20: mol_type = other RNA
ttcgcccttggtgttacacc

SEQ ID NO: 73 - RNA, 21 nt, Synthetic construct
  source 1..21: mol_type = other RNA
gcccttggtgttacaccattt

SEQ ID NO: 74 - RNA, 20 nt, Synthetic construct
  source 1..20: mol_type = other RNA
tcgcccttggtgttacacca

SEQ ID NO: 75 - RNA, 20 nt, Synthetic construct
  source 1..20: mol_type = other RNA
gcccttggtgttacaccatt

SEQ ID NO: 76 - RNA, 21 nt, Synthetic construct
  source 1..21: mol_type = other RNA
ggtgttacaccatggatcttt

SEQ ID NO: 77 - RNA, 21 nt, Synthetic construct
  source 1..21: mol_type = other RNA
gaatcaagtgtccttgcaatt

SEQ ID NO: 78 - RNA, 20 nt, Synthetic construct
  source 1..20: mol_type = other RNA
cagaatcaagtgtccttgca

SEQ ID NO: 79 - RNA, 20 nt, Synthetic construct
  source 1..20: mol_type = other RNA
gaatcaagtgtccttgcaat

SEQ ID NO: 80 - RNA, 18 nt, Synthetic construct
  source 1..18: mol_type = other RNA
gaatcaagtgtccttgca

SEQ ID NO: 81 - RNA, 21 nt, Synthetic construct
  source 1..21: mol_type = other RNA
aatcaagtgtccttgcaactt

SEQ ID NO: 82 - RNA, 21 nt, Synthetic construct
  source 1..21: mol_type = other RNA
aatcaagtgtccttgcaattt

SEQ ID NO: 83 - RNA, 20 nt, Synthetic construct
  source 1..20: mol_type = other RNA
agaatcaagtgtccttgcaa

SEQ ID NO: 84 - RNA, 21 nt, Synthetic construct
  source 1..21: mol_type = other RNA
agaatcaagtgtccttgcaat

SEQ ID NO: 85 - RNA, 20 nt, Synthetic construct
  source 1..20: mol_type = other RNA
aatcaagtgtccttgcaatt

SEQ ID NO: 86 - RNA, 18 nt, Synthetic construct
  source 1..18: mol_type = other RNA
aatcaagtgtccttgcaa

SEQ ID NO: 87 - RNA, 21 nt, Synthetic construct
  source 1..21: mol_type = other RNA
tcaagtgtccttgcaactttt

SEQ ID NO: 88 - RNA, 21 nt, Synthetic construct
  source 1..21: mol_type = other RNA
cttctgaagaagcaccaattt

SEQ ID NO: 89 - RNA, 21 nt, Synthetic construct
  source 1..21: mol_type = other RNA
ttctgaagaagcaccaacatt

SEQ ID NO: 90 - RNA, 21 nt, Synthetic construct
  source 1..21: mol_type = other RNA
tcttggtcctctatgacattt

SEQ ID NO: 91 - RNA, 20 nt, Synthetic construct
  source 1..20: mol_type = other RNA
agtcttggtcctctatgaca

SEQ ID NO: 92 - RNA, 20 nt, Synthetic construct
  source 1..20: mol_type = other RNA
tcttggtcctctatgacatt

SEQ ID NO: 93 - RNA, 19 nt, Synthetic construct
  source 1..19: mol_type = other RNA
tcttggtcctctatgacat

SEQ ID NO: 94 - RNA, 18 nt, Synthetic construct
  source 1..18: mol_type = other RNA
tcttggtcctctatgaca

SEQ ID NO: 95 - RNA, 21 nt, Synthetic construct
  source 1..21: mol_type = other RNA
tgacaccacactggcatcatt

SEQ ID NO: 96 - RNA, 20 nt, Synthetic construct
  source 1..20: mol_type = other RNA
gacaacagaatattatccat

SEQ ID NO: 97 - RNA, 21 nt, Synthetic construct
  source 1..21: mol_type = other RNA
gcaacctgacacaatgtcttt

SEQ ID NO: 98 - RNA, 21 nt, Synthetic construct
  source 1..21: mol_type = other RNA
acacaatgtccagtgacagtt

SEQ ID NO: 99 - RNA, 21 nt, Synthetic construct
  source 1..21: mol_type = other RNA
acacaatgtccagtgacaatt

SEQ ID NO: 100 - RNA, 21 nt, Synthetic construct
  source 1..21: mol_type = other RNA
atgtccagtgacagaatcatt

SEQ ID NO: 101 - RNA, 21 nt, Synthetic construct
  source 1..21: mol_type = other RNA
gtccagtgacagaatcaagtt

SEQ ID NO: 102 - RNA, 21 nt, Synthetic construct
  source 1..21: mol_type = other RNA
gtccagtgacagaatcaaatt

SEQ ID NO: 103 - RNA, 21 nt, Synthetic construct
  source 1..21: mol_type = other RNA
tccagtgacagaatcaagttt

SEQ ID NO: 104 - RNA, 21 nt, Synthetic construct
  source 1..21: mol_type = other RNA
ccagtgacagaatcaagtatt

SEQ ID NO: 105 - RNA, 21 nt, Synthetic construct
  source 1..21: mol_type = other RNA
gtccagtgacagaatcaagta

SEQ ID NO: 106 - RNA, 20 nt, Synthetic construct
  source 1..20: mol_type = other RNA
gtccagtgacagaatcaagt

SEQ ID NO: 107 - RNA, 20 nt, Synthetic construct
  source 1..20: mol_type = other RNA
ccagtgacagaatcaagtat

SEQ ID NO: 108 - RNA, 18 nt, Synthetic construct
  source 1..18: mol_type = other RNA
ccagtgacagaatcaagt

SEQ ID NO: 109 - RNA, 21 nt, Synthetic construct
  source 1..21: mol_type = other RNA
caccactgttacaggaaggtt

SEQ ID NO: 110 - RNA, 21 nt, Synthetic construct
  source 1..21: mol_type = other RNA
caccactgttacaggaagatt

SEQ ID NO: 111 - RNA, 20 nt, Synthetic construct
  source 1..20: mol_type = other RNA
cagaatactacccaaatggt

SEQ ID NO: 112 - RNA, 21 nt, Synthetic construct
  source 1..21: mol_type = other RNA
cccaaatggtggcctgacctt

SEQ ID NO: 113 - RNA, 21 nt, Synthetic construct
  source 1..21: mol_type = other RNA
tataccatggatcccagtgtt

SEQ ID NO: 114 - RNA, 21 nt, Synthetic construct
  source 1..21: mol_type = other RNA
tataccatggatcccagtatt

SEQ ID NO: 115 - RNA, 21 nt, Synthetic construct
  source 1..21: mol_type = other RNA
ttctgaagaagcaccaacttt

SEQ ID NO: 116 - RNA, 21 nt, Synthetic construct
  source 1..21: mol_type = other RNA
ccttctgaagaagcaccaact

SEQ ID NO: 117 - RNA, 20 nt, Synthetic construct
  source 1..20: mol_type = other RNA
ccttctgaagaagcaccaac

SEQ ID NO: 118 - RNA, 21 nt, Synthetic construct
  source 1..21: mol_type = other RNA
ctgaagaagcaccaactgatt

SEQ ID NO: 119 - RNA, 21 nt, Synthetic construct
  source 1..21: mol_type = other RNA
agcaccaactgaaaacagttt

SEQ ID NO: 120 - RNA, 20 nt, Synthetic construct
  source 1..20: mol_type = other RNA
gaagcaccaactgaaaacag

SEQ ID NO: 121 - RNA, 21 nt, Synthetic construct
  source 1..21: mol_type = other RNA
cccggttccaagcacagaatt

SEQ ID NO: 122 - RNA, 21 nt, Synthetic construct
  source 1..21: mol_type = other RNA
agcacagaggctccttctatt

SEQ ID NO: 123 - RNA, 21 nt, Synthetic construct
  source 1..21: mol_type = other RNA
ccttctgaacaagcaccactt

SEQ ID NO: 124 - RNA, 21 nt, Synthetic construct
  source 1..21: mol_type = other RNA
ccttctgaacaagcaccattt

SEQ ID NO: 125 - RNA, 21 nt, Synthetic construct
  source 1..21: mol_type = other RNA
tcagaaacagaatcaggtatt

SEQ ID NO: 126 - RNA, 21 nt, Synthetic construct
  source 1..21: mol_type = other RNA
cagaatcaggtgtcctagatt

SEQ ID NO: 127 - RNA, 21 nt, Synthetic construct
  source 1..21: mol_type = other RNA
gttatcgaggcacattctttt

SEQ ID NO: 128 - RNA, 21 nt, Synthetic construct
  source 1..21: mol_type = other RNA
ttatcgaggcacattctcctt

SEQ ID NO: 129 - RNA, 21 nt, Synthetic construct
  source 1..21: mol_type = other RNA
ttatcgaggcacattctcttt

SEQ ID NO: 130 - RNA, 21 nt, Synthetic construct
  source 1..21: mol_type = other RNA
acgcgatgctcagacacaatt

SEQ ID NO: 131 - RNA, 21 nt, Synthetic construct
  source 1..21: mol_type = other RNA
agacacagaagggactgtatt

SEQ ID NO: 132 - RNA, 21 nt, Synthetic construct
  source 1..21: mol_type = other RNA
tgtcctggaagcattgtaatt

SEQ ID NO: 133 - RNA, 21 nt, Synthetic construct
  source 1..21: mol_type = other RNA
aacaaggtttggaaagcattt

SEQ ID NO: 134 - RNA, 21 nt, Synthetic construct
  source 1..21: mol_type = other RNA
tcacatggctttgctcaggtt

SEQ ID NO: 135 - RNA, 21 nt, Synthetic construct
  source 1..21: mol_type = other RNA
accacatggctttgctcagtt

SEQ ID NO: 136 - RNA, 21 nt, Synthetic construct
  source 1..21: mol_type = other RNA
agtagcaatcctggaccactt

SEQ ID NO: 137 - RNA, 21 nt, Synthetic construct
  source 1..21: mol_type = other RNA
tttgggtagttttctgtggtt

SEQ ID NO: 138 - RNA, 21 nt, Synthetic construct
  source 1..21: mol_type = other RNA
acgacggcagtcccttctgtt

SEQ ID NO: 139 - RNA, 21 nt, Synthetic construct
  source 1..21: mol_type = other RNA
cgcgacggcagtcccttcttt

SEQ ID NO: 140 - RNA, 21 nt, Synthetic construct
  source 1..21: mol_type = other RNA
tgcgacggcagtcccttcttt

SEQ ID NO: 141 - RNA, 21 nt, Synthetic construct
  source 1..21: mol_type = other RNA
atgcttgttcggaaggagctt

SEQ ID NO: 142 - RNA, 21 nt, Synthetic construct
  source 1..21: mol_type = other RNA
agtgcttgttcggaaggagtt

SEQ ID NO: 143 - RNA, 21 nt, Synthetic construct
  source 1..21: mol_type = other RNA
gtcggtgcttgttcggaagtt

SEQ ID NO: 144 - RNA, 21 nt, Synthetic construct
  source 1..21: mol_type = other RNA
atcggtgcttgttcggaagtt

SEQ ID NO: 145 - RNA, 21 nt, Synthetic construct
  source 1..21: mol_type = other RNA
agtcggtgcttgttcggaatt

SEQ ID NO: 146 - RNA, 23 nt, Synthetic construct
  source 1..23: mol_type = other RNA
agtcggtgcttgttcggaaggtt

SEQ ID NO: 147 - RNA, 21 nt, Synthetic construct
  source 1..21: mol_type = other RNA
tagtcggtgcttgttcggatt

SEQ ID NO: 148 - RNA, 21 nt, Synthetic construct
  source 1..21: mol_type = other RNA
ctcagtcggtgcttgttcgtt

SEQ ID NO: 149 - RNA, 21 nt, Synthetic construct
  source 1..21: mol_type = other RNA
tctttgctcagtcggtgcttt

SEQ ID NO: 150 - RNA, 21 nt, Synthetic construct
  source 1..21: mol_type = other RNA
acctttgctcagtcggtgctt

SEQ ID NO: 151 - RNA, 21 nt, Synthetic construct
  source 1..21: mol_type = other RNA
ggcctttgctcagtcggtgtt

SEQ ID NO: 152 - RNA, 21 nt, Synthetic construct
  source 1..21: mol_type = other RNA
ttcctgcaccccaggcctttt

SEQ ID NO: 153 - RNA, 21 nt, Synthetic construct
  source 1..21: mol_type = other RNA
tagcactcctgcaccccagtt

SEQ ID NO: 154 - RNA, 21 nt, Synthetic construct
  source 1..21: mol_type = other RNA
ggtagcactcctgcacccctt

SEQ ID NO: 155 - RNA, 21 nt, Synthetic construct
  source 1..21: mol_type = other RNA
tgccacaggatctggattctt

SEQ ID NO: 156 - RNA, 21 nt, Synthetic construct
  source 1..21: mol_type = other RNA
aataaggggctgccacaggtt

SEQ ID NO: 157 - RNA, 21 nt, Synthetic construct
  source 1..21: mol_type = other RNA
ataacaataaggggctgcctt

SEQ ID NO: 158 - RNA, 23 nt, Synthetic construct
  source 1..23: mol_type = other RNA
ataacaataaggggctgccactt

SEQ ID NO: 159 - RNA, 21 nt, Synthetic construct
  source 1..21: mol_type = other RNA
tataacaataaggggctgctt

SEQ ID NO: 160 - RNA, 21 nt, Synthetic construct
  source 1..21: mol_type = other RNA
cgtataacaataaggggcttt

SEQ ID NO: 161 - RNA, 21 nt, Synthetic construct
  source 1..21: mol_type = other RNA
tgtataacaataaggggcttt

SEQ ID NO: 162 - RNA, 21 nt, Synthetic construct
  source 1..21: mol_type = other RNA
tcgtataacaataaggggctt

SEQ ID NO: 163 - RNA, 23 nt, Synthetic construct
  source 1..23: mol_type = other RNA
tcgtataacaataaggggctgtt

SEQ ID NO: 164 - RNA, 21 nt, Synthetic construct
  source 1..21: mol_type = other RNA
ctcgtataacaataaggggtt

SEQ ID NO: 165 - RNA, 23 nt, Synthetic construct
  source 1..23: mol_type = other RNA
ctcgtataacaataaggggcttt

SEQ ID NO: 166 - RNA, 21 nt, Synthetic construct
  source 1..21: mol_type = other RNA
ttcgtataacaataaggggtt

SEQ ID NO: 167 - RNA, 21 nt, Synthetic construct
  source 1..21: mol_type = other RNA
cgtctgagcattgtgtcagtt

SEQ ID NO: 168 - RNA, 21 nt, Synthetic construct
  source 1..21: mol_type = other RNA
tgtctgagcattgtgtcagtt

SEQ ID NO: 169 - RNA, 23 nt, Synthetic construct
  source 1..23: mol_type = other RNA
tgtctgagcattgtgtcaggttt

SEQ ID NO: 170 - RNA, 23 nt, Synthetic construct
  source 1..23: mol_type = other RNA
cgtctgagcattgtgtcaggttt

SEQ ID NO: 171 - RNA, 21 nt, Synthetic construct
  source 1..21: mol_type = other RNA
tgcgtctgagcattgtgtctt

SEQ ID NO: 172 - RNA, 21 nt, Synthetic construct
  source 1..21: mol_type = other RNA
ctgcgtctgagcattgtgttt

SEQ ID NO: 173 - RNA, 23 nt, Synthetic construct
  source 1..23: mol_type = other RNA
ctgcgtctgagcattgtgtcatt

SEQ ID NO: 174 - RNA, 23 nt, Synthetic construct
  source 1..23: mol_type = other RNA
ttgcgtctgagcattgtgtcatt

SEQ ID NO: 175 - RNA, 21 nt, Synthetic construct
  source 1..21: mol_type = other RNA
ttgcgtctgagcattgtgttt

SEQ ID NO: 176 - RNA, 21 nt, Synthetic construct
  source 1..21: mol_type = other RNA
ttgcgtctgagcattgtgtca

SEQ ID NO: 177 - RNA, 21 nt, Synthetic construct
  source 1..21: mol_type = other RNA
ttcagaaggagcctctaggtt

SEQ ID NO: 178 - RNA, 23 nt, Synthetic construct
  source 1..23: mol_type = other RNA
ttcagaaggagcctctaggcttt

SEQ ID NO: 179 - RNA, 21 nt, Synthetic construct
  source 1..21: mol_type = other RNA
ttgttcagaaggagcctcttt

SEQ ID NO: 180 - RNA, 21 nt, Synthetic construct
  source 1..21: mol_type = other RNA
tctttgctcagttggtgcttt

SEQ ID NO: 181 - RNA, 21 nt, Synthetic construct
  source 1..21: mol_type = other RNA
tgccacaggatctggattttt

SEQ ID NO: 182 - RNA, 21 nt, Synthetic construct
  source 1..21: mol_type = other RNA
ataacaccaaggggctgcctt

SEQ ID NO: 183 - RNA, 21 nt, Synthetic construct
  source 1..21: mol_type = other RNA
accaagcttggcaagttcttt

SEQ ID NO: 184 - RNA, 23 nt, Synthetic construct
  source 1..23: mol_type = other RNA
accaagcttggcaagttcttctt

SEQ ID NO: 185 - RNA, 21 nt, Synthetic construct
  source 1..21: mol_type = other RNA
aaccaagcttggcaagttctt

SEQ ID NO: 186 - RNA, 23 nt, Synthetic construct
  source 1..23: mol_type = other RNA
aaccaagcttggcaagttctttt

SEQ ID NO: 187 - RNA, 21 nt, Synthetic construct
  source 1..21: mol_type = other RNA
agtccgactatgctggtgttt

SEQ ID NO: 188 - RNA, 21 nt, Synthetic construct
  source 1..21: mol_type = other RNA
aggtccgactatgctggtgtt

SEQ ID NO: 189 - RNA, 21 nt, Synthetic construct
  source 1..21: mol_type = other RNA
tggtgtaacaccaagggcgtt

SEQ ID NO: 190 - RNA, 23 nt, Synthetic construct
  source 1..23: mol_type = other RNA
tggtgtaacaccaagggcgaatt

SEQ ID NO: 191 - RNA, 21 nt, Synthetic construct
  source 1..21: mol_type = other RNA
atggtgtaacaccaagggctt

SEQ ID NO: 192 - RNA, 23 nt, Synthetic construct
  source 1..23: mol_type = other RNA
atggtgtaacaccaagggcgatt

SEQ ID NO: 193 - RNA, 21 nt, Synthetic construct
  source 1..21: mol_type = other RNA
agatccatggtgtaacacctt

SEQ ID NO: 194 - RNA, 21 nt, Synthetic construct
  source 1..21: mol_type = other RNA
ttgcaaggacacttgattctt

SEQ ID NO: 195 - RNA, 23 nt, Synthetic construct
  source 1..23: mol_type = other RNA
ttgcaaggacacttgattctgtt

SEQ ID NO: 196 - RNA, 21 nt, Synthetic construct
  source 1..21: mol_type = other RNA
ttgcaaggacacttgattctg

SEQ ID NO: 197 - RNA, 21 nt, Synthetic construct
  source 1..21: mol_type = other RNA
gttgcaaggacacttgatttt

SEQ ID NO: 198 - RNA, 21 nt, Synthetic construct
  source 1..21: mol_type = other RNA
attgcaaggacacttgatttt

SEQ ID NO: 199 - RNA, 23 nt, Synthetic construct
  source 1..23: mol_type = other RNA
attgcaaggacacttgattcttt

SEQ ID NO: 200 - RNA, 21 nt, Synthetic construct
  source 1..21: mol_type = other RNA
attgcaaggacacttgattct

SEQ ID NO: 201 - RNA, 21 nt, Synthetic construct
  source 1..21: mol_type = other RNA
aagttgcaaggacacttgatt

SEQ ID NO: 202 - RNA, 21 nt, Synthetic construct
  source 1..21: mol_type = other RNA
attggtgcttcttcagaagtt

SEQ ID NO: 203 - RNA, 21 nt, Synthetic construct
  source 1..21: mol_type = other RNA
tgttggtgcttcttcagaatt

SEQ ID NO: 204 - RNA, 21 nt, Synthetic construct
  source 1..21: mol_type = other RNA
atgtcatagaggaccaagatt

SEQ ID NO: 205 - RNA, 23 nt, Synthetic construct
  source 1..23: mol_type = other RNA
atgtcatagaggaccaagacttt

SEQ ID NO: 206 - RNA, 21 nt, Synthetic construct
  source 1..21: mol_type = other RNA
tgatgccagtgtggtgtcatt

SEQ ID NO: 207 - RNA, 21 nt, Synthetic construct
  source 1..21: mol_type = other RNA
tggataatattctgttgtctt

SEQ ID NO: 208 - RNA, 21 nt, Synthetic construct
  source 1..21: mol_type = other RNA
agacattgtgtcaggttgctt

SEQ ID NO: 209 - RNA, 21 nt, Synthetic construct
  source 1..21: mol_type = other RNA
ctgtcactggacattgtgttt

SEQ ID NO: 210 - RNA, 21 nt, Synthetic construct
  source 1..21: mol_type = other RNA
ttgtcactggacattgtgttt

SEQ ID NO: 211 - RNA, 21 nt, Synthetic construct
  source 1..21: mol_type = other RNA
tgattctgtcactggacattt

SEQ ID NO: 212 - RNA, 21 nt, Synthetic construct
  source 1..21: mol_type = other RNA
cttgattctgtcactggactt

SEQ ID NO: 213 - RNA, 21 nt, Synthetic construct
  source 1..21: mol_type = other RNA
tttgattctgtcactggactt

SEQ ID NO: 214 - RNA, 21 nt, Synthetic construct
  source 1..21: mol_type = other RNA
acttgattctgtcactggatt

SEQ ID NO: 215 - RNA, 21 nt, Synthetic construct
  source 1..21: mol_type = other RNA
tacttgattctgtcactggtt

SEQ ID NO: 216 - RNA, 23 nt, Synthetic construct
  source 1..23: mol_type = other RNA
tacttgattctgtcactggactt

SEQ ID NO: 217 - RNA, 21 nt, Synthetic construct
  source 1..21: mol_type = other RNA
tacttgattctgtcactggac

SEQ ID NO: 218 - RNA, 21 nt, Synthetic construct
  source 1..21: mol_type = other RNA
ccttcctgtaacagtggtgtt

SEQ ID NO: 219 - RNA, 21 nt, Synthetic construct
  source 1..21: mol_type = other RNA
tcttcctgtaacagtggtgtt

SEQ ID NO: 220 - RNA, 23 nt, Synthetic construct
  source 1..23: mol_type = other RNA
taccatttgggtagtattctgtt

SEQ ID NO: 221 - RNA, 21 nt, Synthetic construct
  source 1..21: mol_type = other RNA
ggtcaggccaccatttgggtt

SEQ ID NO: 222 - RNA, 21 nt, Synthetic construct
  source 1..21: mol_type = other RNA
cactgggatccatggtatatt

SEQ ID NO: 223 - RNA, 21 nt, Synthetic construct
  source 1..21: mol_type = other RNA
tactgggatccatggtatatt

SEQ ID NO: 224 - RNA, 21 nt, Synthetic construct
  source 1..21: mol_type = other RNA
agttggtgcttcttcagaatt

SEQ ID NO: 225 - RNA, 23 nt, Synthetic construct
  source 1..23: mol_type = other RNA
agttggtgcttcttcagaaggtt

SEQ ID NO: 226 - RNA, 21 nt, Synthetic construct
  source 1..21: mol_type = other RNA
tcagttggtgcttcttcagtt

SEQ ID NO: 227 - RNA, 21 nt, Synthetic construct
  source 1..21: mol_type = other RNA
actgttttcagttggtgcttt

SEQ ID NO: 228 - RNA, 23 nt, Synthetic construct
  source 1..23: mol_type = other RNA
actgttttcagttggtgcttctt

SEQ ID NO: 229 - RNA, 21 nt, Synthetic construct
  source 1..21: mol_type = other RNA
ttctgtgcttggaaccgggtt

SEQ ID NO: 230 - RNA, 21 nt, Synthetic construct
  source 1..21: mol_type = other RNA
tagaaggagcctctgtgcttt

SEQ ID NO: 231 - RNA, 21 nt, Synthetic construct
  source 1..21: mol_type = other RNA
gtggtgcttgttcagaaggtt

SEQ ID NO: 232 - RNA, 21 nt, Synthetic construct
  source 1..21: mol_type = other RNA
atggtgcttgttcagaaggtt

SEQ ID NO: 233 - RNA, 21 nt, Synthetic construct
  source 1..21: mol_type = other RNA
tacctgattctgtttctgatt

SEQ ID NO: 234 - RNA, 21 nt, Synthetic construct
  source 1..21: mol_type = other RNA
tctaggacacctgattctgtt

SEQ ID NO: 235 - RNA, 21 nt, Synthetic construct
  source 1..21: mol_type = other RNA
aagaatgtgcctcgataactt

SEQ ID NO: 236 - RNA, 21 nt, Synthetic construct
  source 1..21: mol_type = other RNA
ggagaatgtgcctcgataatt

SEQ ID NO: 237 - RNA, 21 nt, Synthetic construct
  source 1..21: mol_type = other RNA
agagaatgtgcctcgataatt

SEQ ID NO: 238 - RNA, 21 nt, Synthetic construct
  source 1..21: mol_type = other RNA
ttgtgtctgagcatcgcgttt

SEQ ID NO: 239 - RNA, 21 nt, Synthetic construct
  source 1..21: mol_type = other RNA
tacagtcccttctgtgtcttt

SEQ ID NO: 240 - RNA, 21 nt, Synthetic construct
  source 1..21: mol_type = other RNA
ttacaatgcttccaggacatt

SEQ ID NO: 241 - RNA, 21 nt, Synthetic construct
  source 1..21: mol_type = other RNA
atgctttccaaaccttgtttt

SEQ ID NO: 242 - RNA, 21 nt, Synthetic construct
  source 1..21: mol_type = other RNA
  misc_feature 1: note = GalNAc3
  modified_base 1..6: mod_base = OTHER; note = 2'-O-methyl ribonucleotide
  modified_base 7: mod_base = OTHER; note = 2'-deoxy-2'-fluoro ribonucleotide
  modified_base 8: mod_base = OTHER; note = 2'-O-methyl ribonucleotide
  modified_base 9..12: mod_base = OTHER; note = 2'-deoxy-2'-fluoro ribonucleotide
  modified_base 13..21: mod_base = OTHER; note = 2'-O-methyl ribonucleotide
  modified_base 19..20: mod_base = OTHER; note = phosphorothioate internucleotide linkage
  modified_base 20..21: mod_base = OTHER; note = phosphorothioate internucleotide linkage
cctgagcaaagccatgtgatt

SEQ ID NO: 243 - RNA, 21 nt, Synthetic construct
  source 1..21: mol_type = other RNA
  misc_feature 1: note = GalNAc3
  modified_base 1: mod_base = OTHER; note = 2'-deoxy-2'-fluoro ribonucleotide
  modified_base 2: mod_base = OTHER; note = 2'-O-methyl ribonucleotide
  modified_base 3: mod_base = OTHER; note = 2'-deoxy-2'-fluoro ribonucleotide
  modified_base 4: mod_base = OTHER; note = 2'-O-methyl ribonucleotide
  modified_base 5: mod_base = OTHER; note = 2'-deoxy-2'-fluoro ribonucleotide
  modified_base 6: mod_base = OTHER; note = 2'-O-methyl ribonucleotide
  modified_base 7: mod_base = OTHER; note = 2'-deoxy-2'-fluoro ribonucleotide
  modified_base 8: mod_base = OTHER; note = 2'-O-methyl ribonucleotide
  modified_base 9..12: mod_base = OTHER; note = 2'-deoxy-2'-fluoro ribonucleotide
  modified_base 13..14: mod_base = OTHER; note = 2'-O-methyl ribonucleotide
  modified_base 15: mod_base = OTHER; note = 2'-deoxy-2'-fluoro ribonucleotide
  modified_base 16: mod_base = OTHER; note = 2'-O-methyl ribonucleotide
  modified_base 17: mod_base = OTHER; note = 2'-deoxy-2'-fluoro ribonucleotide
  modified_base 18: mod_base = OTHER; note = 2'-O-methyl ribonucleotide
  modified_base 19: mod_base = OTHER; note = 2'-deoxy-2'-fluoro ribonucleotide
  modified_base 20: mod_base = OTHER; note = 2'-O-methyl ribonucleotide
  modified_base 21: mod_base = OTHER; note = 2'-deoxy-2'-fluoro ribonucleotide
  modified_base 19..20: mod_base = OTHER; note = phosphorothioate internucleotide linkage
  modified_base 20..21: mod_base = OTHER; note = phosphorothioate internucleotide linkage
ctgagcaaagccatgtggttt

SEQ ID NO: 244 - RNA, 21 nt, Synthetic construct
  source 1..21: mol_type = other RNA
  misc_feature 1: note = GalNAc3
  modified_base 1..6: mod_base = OTHER; note = 2'-O-methyl ribonucleotide
  modified_base 7: mod_base = OTHER; note = 2'-deoxy-2'-fluoro ribonucleotide
  modified_base 8: mod_base = OTHER; note = 2'-O-methyl ribonucleotide
  modified_base 9..12: mod_base = OTHER; note = 2'-deoxy-2'-fluoro ribonucleotide
  modified_base 13..21: mod_base = OTHER; note = 2'-O-methyl ribonucleotide
  modified_base 19..20: mod_base = OTHER; note = phosphorothioate internucleotide linkage
  modified_base 20..21: mod_base = OTHER; note = phosphorothioate internucleotide linkage
gtggtccaggattgctacttt

SEQ ID NO: 245 - RNA, 21 nt, Synthetic construct
  source 1..21: mol_type = other RNA
  misc_feature 1: note = GalNAc3
  modified_base 1..6: mod_base = OTHER; note = 2'-O-methyl ribonucleotide
  modified_base 7: mod_base = OTHER; note = 2'-deoxy-2'-fluoro ribonucleotide
  modified_base 8: mod_base = OTHER; note = 2'-O-methyl ribonucleotide
  modified_base 9..12: mod_base = OTHER; note = 2'-deoxy-2'-fluoro ribonucleotide
  modified_base 13..21: mod_base = OTHER; note = 2'-O-methyl ribonucleotide
  modified_base 19..20: mod_base = OTHER; note = phosphorothioate internucleotide linkage
  modified_base 20..21: mod_base = OTHER; note = phosphorothioate internucleotide linkage
ccacagaaaactacccaaatt

SEQ ID NO: 246 - RNA, 21 nt, Synthetic construct
  source 1..21: mol_type = other RNA
  misc_feature 1: note = GalNAc3
  modified_base 1..6: mod_base = OTHER; note = 2'-O-methyl ribonucleotide
  modified_base 7: mod_base = OTHER; note = 2'-deoxy-2'-fluoro ribonucleotide
  modified_base 8: mod_base = OTHER; note = 2'-O-methyl ribonucleotide
  modified_base 9..12: mod_base = OTHER; note = 2'-deoxy-2'-fluoro ribonucleotide
  modified_base 13..21: mod_base = OTHER; note = 2'-O-methyl ribonucleotide
  modified_base 19..20: mod_base = OTHER; note = phosphorothioate internucleotide linkage
  modified_base 20..21: mod_base = OTHER; note = phosphorothioate internucleotide linkage
cagaagggactgccgtcgttt

SEQ ID NO: 247 - RNA, 21 nt, Synthetic construct
  source 1..21: mol_type = other RNA
  misc_feature 1: note = GalNAc3
  modified_base 1..6: mod_base = OTHER; note = 2'-O-methyl ribonucleotide
  modified_base 7: mod_base = OTHER; note = 2'-deoxy-2'-fluoro ribonucleotide
  modified_base 8: mod_base = OTHER; note = 2'-O-methyl ribonucleotide
  modified_base 9..12: mod_base = OTHER; note = 2'-deoxy-2'-fluoro ribonucleotide
  modified_base 13..21: mod_base = OTHER; note = 2'-O-methyl ribonucleotide
  modified_base 19..20: mod_base = OTHER; note = phosphorothioate internucleotide linkage
  modified_base 20..21: mod_base = OTHER; note = phosphorothioate internucleotide linkage
agaagggactgccgtcgcgtt

SEQ ID NO: 248 - RNA, 21 nt, Synthetic construct
  source 1..21: mol_type = other RNA
  misc_feature 1: note = GalNAc3
  modified_base 1..6: mod_base = OTHER; note = 2'-O-methyl ribonucleotide
  modified_base 7: mod_base = OTHER; note = 2'-deoxy-2'-fluoro ribonucleotide
  modified_base 8: mod_base = OTHER; note = 2'-O-methyl ribonucleotide
  modified_base 9..12: mod_base = OTHER; note = 2'-deoxy-2'-fluoro ribonucleotide
  modified_base 13..21: mod_base = OTHER; note = 2'-O-methyl ribonucleotide
  modified_base 19..20: mod_base = OTHER; note = phosphorothioate internucleotide linkage
  modified_base 20..21: mod_base = OTHER; note = phosphorothioate internucleotide linkage
agaagggactgccgtcgcatt

SEQ ID NO: 249 - RNA, 21 nt, Synthetic construct
  source 1..21: mol_type = other RNA
  misc_feature 1: note = GalNAc3
  modified_base 1..6: mod_base = OTHER; note = 2'-O-methyl ribonucleotide
  modified_base 7: mod_base = OTHER; note = 2'-deoxy-2'-fluoro ribonucleotide
  modified_base 8: mod_base = OTHER; note = 2'-O-methyl ribonucleotide
  modified_base 9..12: mod_base = OTHER; note = 2'-deoxy-2'-fluoro ribonucleotide
  modified_base 13..21: mod_base = OTHER; note = 2'-O-methyl ribonucleotide
  modified_base 19..20: mod_base = OTHER; note = phosphorothioate internucleotide linkage
  modified_base 20..21: mod_base = OTHER; note = phosphorothioate internucleotide linkage
gctccttccgaacaagcattt

SEQ ID NO: 250 - RNA, 21 nt, Synthetic construct
  source 1..21: mol_type = other RNA
  misc_feature 1: note = GalNAc3
  modified_base 1..6: mod_base = OTHER; note = 2'-O-methyl ribonucleotide
  modified_base 7: mod_base = OTHER; note = 2'-deoxy-2'-fluoro ribonucleotide
  modified_base 8: mod_base = OTHER; note = 2'-O-methyl ribonucleotide
  modified_base 9..12: mod_base = OTHER; note = 2'-deoxy-2'-fluoro ribonucleotide
  modified_base 13..21: mod_base = OTHER; note = 2'-O-methyl ribonucleotide
  modified_base 19..20: mod_base = OTHER; note = phosphorothioate internucleotide linkage
  modified_base 20..21: mod_base = OTHER; note = phosphorothioate internucleotide linkage
ctccttccgaacaagcacttt

SEQ ID NO: 251 - RNA, 21 nt, Synthetic construct
  source 1..21: mol_type = other RNA
  misc_feature 1: note = GalNAc3
  modified_base 1..6: mod_base = OTHER; note = 2'-O-methyl ribonucleotide
  modified_base 7: mod_base = OTHER; note = 2'-deoxy-2'-fluoro ribonucleotide
  modified_base 8: mod_base = OTHER; note = 2'-O-methyl ribonucleotide
  modified_base 9..12: mod_base = OTHER; note = 2'-deoxy-2'-fluoro ribonucleotide
  modified_base 13..21: mod_base = OTHER; note = 2'-O-methyl ribonucleotide
  modified_base 19..20: mod_base = OTHER; note = phosphorothioate internucleotide linkage
  modified_base 20..21: mod_base = OTHER; note = phosphorothioate internucleotide linkage
cttccgaacaagcaccgactt

SEQ ID NO: 252 - RNA, 21 nt, Synthetic construct
  source 1..21: mol_type = other RNA
  misc_feature 1: note = GalNAc3
  modified_base 1..6: mod_base = OTHER; note = 2'-O-methyl ribonucleotide
  modified_base 7: mod_base = OTHER; note = 2'-deoxy-2'-fluoro ribonucleotide
  modified_base 8: mod_base = OTHER; note = 2'-O-methyl ribonucleotide
  modified_base 9..12: mod_base = OTHER; note = 2'-deoxy-2'-fluoro ribonucleotide
  modified_base 13..21: mod_base = OTHER; note = 2'-O-methyl ribonucleotide
  modified_base 19..20: mod_base = OTHER; note = phosphorothioate internucleotide linkage
  modified_base 20..21: mod_base = OTHER; note = phosphorothioate internucleotide linkage
cttccgaacaagcaccgattt

SEQ ID NO: 253 - RNA, 21 nt, Synthetic construct
  source 1..21: mol_type = other RNA
  misc_feature 1: note = GalNAc3
  modified_base 1..6: mod_base = OTHER; note = 2'-O-methyl ribonucleotide
  modified_base 7: mod_base = OTHER; note = 2'-deoxy-2'-fluoro ribonucleotide
  modified_base 8: mod_base = OTHER; note = 2'-O-methyl ribonucleotide
  modified_base 9..12: mod_base = OTHER; note = 2'-deoxy-2'-fluoro ribonucleotide
  modified_base 13..21: mod_base = OTHER; note = 2'-O-methyl ribonucleotide
  modified_base 19..20: mod_base = OTHER; note = phosphorothioate internucleotide linkage
  modified_base 20..21: mod_base = OTHER; note = phosphorothioate internucleotide linkage
ttccgaacaagcaccgacttt

SEQ ID NO: 254 - RNA, 22 nt, Synthetic construct
  source 1..22: mol_type = other RNA
  misc_feature 1: note = GalNAc3
  misc_feature 1: note = invAb
  modified_base 2: mod_base = OTHER; note = 2'-deoxy-2'-fluoro ribonucleotide
  modified_base 3: mod_base = OTHER; note = 2'-O-methyl ribonucleotide
  modified_base 4: mod_base = OTHER; note = 2'-deoxy-2'-fluoro ribonucleotide
  modified_base 5: mod_base = OTHER; note = 2'-O-methyl ribonucleotide
  modified_base 6: mod_base = OTHER; note = 2'-deoxy-2'-fluoro ribonucleotide
  modified_base 7: mod_base = OTHER; note = 2'-O-methyl ribonucleotide
  modified_base 8: mod_base = OTHER; note = 2'-deoxy-2'-fluoro ribonucleotide
  modified_base 9: mod_base = OTHER; note = 2'-O-methyl ribonucleotide
  modified_base 10: mod_base = OTHER; note = 2'-deoxy-2'-fluoro ribonucleotide
  modified_base 11: mod_base = OTHER; note = 2'-O-methyl ribonucleotide
  modified_base 12..15: mod_base = OTHER; note = 2'-deoxy-2'-fluoro ribonucleotide
  modified_base 16..17: mod_base = OTHER; note = 2'-O-methyl ribonucleotide
  modified_base 18: mod_base = OTHER; note = 2'-deoxy-2'-fluoro ribonucleotide
  modified_base 19: mod_base = OTHER; note = 2'-O-methyl ribonucleotide
  modified_base 20: mod_base = OTHER; note = 2'-deoxy-2'-fluoro ribonucleotide
  modified_base 21: mod_base = OTHER; note = 2'-O-methyl ribonucleotide
  modified_base 22: mod_base = OTHER; note = 2'-deoxy-2'-fluoro ribonucleotide
  modified_base 20..21: mod_base = OTHER; note = phosphorothioate internucleotide linkage
  modified_base 21..22: mod_base = OTHER; note = phosphorothioate internucleotide linkage
nccttccgaacaagcaccgact

SEQ ID NO: 255 - RNA, 22 nt, Synthetic construct
  source 1..22: mol_type = other RNA
  misc_feature 1: note = GalNAc3
  misc_feature 1: note = invAb
  modified_base 2..7: mod_base = OTHER; note = 2'-O-methyl ribonucleotide
  modified_base 8: mod_base = OTHER; note = 2'-deoxy-2'-fluoro ribonucleotide
  modified_base 9: mod_base = OTHER; note = 2'-O-methyl ribonucleotide
  modified_base 10..13: mod_base = OTHER; note = 2'-deoxy-2'-fluoro ribonucleotide
  modified_base 14..22: mod_base = OTHER; note = 2'-O-methyl ribonucleotide
  modified_base 20..21: mod_base = OTHER; note = phosphorothioate internucleotide linkage
  modified_base 21..22: mod_base = OTHER; note = phosphorothioate internucleotide linkage
nttccgaacaagcaccgacttt

SEQ ID NO: 256 - RNA, 21 nt, Synthetic construct
  source 1..21: mol_type = other RNA
  misc_feature 1: note = GalNAc3
  modified_base 1..8: mod_base = OTHER; note = 2'-O-methyl ribonucleotide
  modified_base 9: mod_base = OTHER; note = 2'-deoxy-2'-fluoro ribonucleotide
  modified_base 10: mod_base = OTHER; note = 2'-O-methyl ribonucleotide
  modified_base 11..14: mod_base = OTHER; note = 2'-deoxy-2'-fluoro ribonucleotide
  modified_base 15..21: mod_base = OTHER; note = 2'-O-methyl ribonucleotide
  modified_base 19..20: mod_base = OTHER; note = phosphorothioate internucleotide linkage
  modified_base 20..21: mod_base = OTHER; note = phosphorothioate internucleotide linkage
ccttccgaacaagcaccgact

SEQ ID NO: 257 - RNA, 22 nt, Synthetic construct
  source 1..22: mol_type = other RNA
  misc_feature 1: note = GalNAc3
  misc_feature 1: note = invAb
  misc_feature 22: note = invAb
  modified_base 2..9: mod_base = OTHER; note = 2'-O-methyl ribonucleotide
  modified_base 10: mod_base = OTHER; note = 2'-deoxy-2'-fluoro ribonucleotide
  modified_base 11: mod_base = OTHER; note = 2'-O-methyl ribonucleotide
  modified_base 12..15: mod_base = OTHER; note = 2'-deoxy-2'-fluoro ribonucleotide
  modified_base 16..21: mod_base = OTHER; note = 2'-O-methyl ribonucleotide
  modified_base 21..22: mod_base = OTHER; note = phosphorothioate internucleotide linkage
nccttccgaacaagcaccgacn

SEQ ID NO: 258 - RNA, 22 nt, Synthetic construct
  source 1..22: mol_type = other RNA
  misc_feature 1: note = GalNAc3
  misc_feature 1: note = invAb
  modified_base 2..9: mod_base = OTHER; note = 2'-O-methyl ribonucleotide
  modified_base 10: mod_base = OTHER; note = 2'-deoxy-2'-fluoro ribonucleotide
  modified_base 11: mod_base = OTHER; note = 2'-O-methyl ribonucleotide
  modified_base 12..15: mod_base = OTHER; note = 2'-deoxy-2'-fluoro ribonucleotide
  modified_base 16..22: mod_base = OTHER; note = 2'-O-methyl ribonucleotide
  modified_base 20..21: mod_base = OTHER; note = phosphorothioate internucleotide linkage
  modified_base 21..22: mod_base = OTHER; note = phosphorothioate internucleotide linkage
nccttccgaacaagcaccgact

SEQ ID NO: 259 - RNA, 21 nt, Synthetic construct
  source 1..21: mol_type = other RNA
  misc_feature 1: note = GalNAc3
  modified_base 1..6: mod_base = OTHER; note = 2'-O-methyl ribonucleotide
  modified_base 7: mod_base = OTHER; note = 2'-deoxy-2'-fluoro ribonucleotide
  modified_base 8: mod_base = OTHER; note = 2'-O-methyl ribonucleotide
  modified_base 9..12: mod_base = OTHER; note = 2'-deoxy-2'-fluoro ribonucleotide
  modified_base 13..21: mod_base = OTHER; note = 2'-O-methyl ribonucleotide
  modified_base 19..20: mod_base = OTHER; note = phosphorothioate internucleotide linkage
  modified_base 20..21: mod_base = OTHER; note = phosphorothioate internucleotide linkage
tccgaacaagcaccgactatt

SEQ ID NO: 260 - RNA, 21 nt, Synthetic construct
  source 1..21: mol_type = other RNA
  misc_feature 1: note = GalNAc3
  modified_base 1..6: mod_base = OTHER; note = 2'-O-methyl ribonucleotide
  modified_base 7: mod_base = OTHER; note = 2'-deoxy-2'-fluoro ribonucleotide
  modified_base 8: mod_base = OTHER; note = 2'-O-methyl ribonucleotide
  modified_base 9..12: mod_base = OTHER; note = 2'-deoxy-2'-fluoro ribonucleotide
  modified_base 13..21: mod_base = OTHER; note = 2'-O-methyl ribonucleotide
  modified_base 19..20: mod_base = OTHER; note = phosphorothioate internucleotide linkage
  modified_base 20..21: mod_base = OTHER; note = phosphorothioate internucleotide linkage
cgaacaagcaccgactgagtt

SEQ ID NO: 261 - RNA, 21 nt, Synthetic construct
  source 1..21: mol_type = other RNA
  misc_feature 1: note = GalNAc3
  modified_base 1..6: mod_base = OTHER; note = 2'-O-methyl ribonucleotide
  modified_base 7: mod_base = OTHER; note = 2'-deoxy-2'-fluoro ribonucleotide
  modified_base 8: mod_base = OTHER; note = 2'-O-methyl ribonucleotide
  modified_base 9..12: mod_base = OTHER; note = 2'-deoxy-2'-fluoro ribonucleotide
  modified_base 13..21: mod_base = OTHER; note = 2'-O-methyl ribonucleotide
  modified_base 19..20: mod_base = OTHER; note = phosphorothioate internucleotide linkage
  modified_base 20..21: mod_base = OTHER; note = phosphorothioate internucleotide linkage
agcaccgactgagcaaagatt

SEQ ID NO: 262 - RNA, 21 nt, Synthetic construct
  source 1..21: mol_type = other RNA
  misc_feature 1: note = GalNAc3
  modified_base 1..6: mod_base = OTHER; note = 2'-O-methyl ribonucleotide
  modified_base 7: mod_base = OTHER; note = 2'-deoxy-2'-fluoro ribonucleotide
  modified_base 8: mod_base = OTHER; note = 2'-O-methyl ribonucleotide
  modified_base 9..12: mod_base = OTHER; note = 2'-deoxy-2'-fluoro ribonucleotide
  modified_base 13..21: mod_base = OTHER; note = 2'-O-methyl ribonucleotide
  modified_base 19..20: mod_base = OTHER; note = phosphorothioate internucleotide linkage
  modified_base 20..21: mod_base = OTHER; note = phosphorothioate internucleotide linkage
gcaccgactgagcaaaggttt

SEQ ID NO: 263 - RNA, 21 nt, Synthetic construct
  source 1..21: mol_type = other RNA
  misc_feature 1: note = GalNAc3
  modified_base 1..6: mod_base = OTHER; note = 2'-O-methyl ribonucleotide
  modified_base 7: mod_base = OTHER; note = 2'-deoxy-2'-fluoro ribonucleotide
  modified_base 8: mod_base = OTHER; note = 2'-O-methyl ribonucleotide
  modified_base 9..12: mod_base = OTHER; note = 2'-deoxy-2'-fluoro ribonucleotide
  modified_base 13..21: mod_base = OTHER; note = 2'-O-methyl ribonucleotide
  modified_base 19..20: mod_base = OTHER; note = phosphorothioate internucleotide linkage
  modified_base 20..21: mod_base = OTHER; note = phosphorothioate internucleotide linkage
caccgactgagcaaaggcctt

SEQ ID NO: 264 - RNA, 21 nt, Synthetic construct
  source 1..21: mol_type = other RNA
  misc_feature 1: note = GalNAc3
  modified_base 1..6: mod_base = OTHER; note = 2'-O-methyl ribonucleotide
  modified_base 7: mod_base = OTHER; note = 2'-deoxy-2'-fluoro ribonucleotide
  modified_base 8: mod_base = OTHER; note = 2'-O-methyl ribonucleotide
  modified_base 9..12: mod_base = OTHER; note = 2'-deoxy-2'-fluoro ribonucleotide
  modified_base 13..21: mod_base = OTHER; note = 2'-O-methyl ribonucleotide
  modified_base 19..20: mod_base = OTHER; note = phosphorothioate internucleotide linkage
  modified_base 20..21: mod_base = OTHER; note = phosphorothioate internucleotide linkage
aaggcctggggtgcaggaatt

SEQ ID NO: 265 - RNA, 21 nt, Synthetic construct
  source 1..21: mol_type = other RNA
  misc_feature 1: note = GalNAc3
  modified_base 1..6: mod_base = OTHER; note = 2'-O-methyl ribonucleotide
  modified_base 7: mod_base = OTHER; note = 2'-deoxy-2'-fluoro ribonucleotide
  modified_base 8: mod_base = OTHER; note = 2'-O-methyl ribonucleotide
  modified_base 9..12: mod_base = OTHER; note = 2'-deoxy-2'-fluoro ribonucleotide
  modified_base 13..21: mod_base = OTHER; note = 2'-O-methyl ribonucleotide
  modified_base 19..20: mod_base = OTHER; note = phosphorothioate internucleotide linkage
  modified_base 20..21: mod_base = OTHER; note = phosphorothioate internucleotide linkage
ctggggtgcaggagtgctatt

SEQ ID NO: 266 - RNA, 21 nt, Synthetic construct
  source 1..21: mol_type = other RNA
  misc_feature 1: note = GalNAc3
  misc_feature 21: note = invAb
  modified_base 1..6: mod_base = OTHER; note = 2'-O-methyl ribonucleotide
  modified_base 7: mod_base = OTHER; note = 2'-deoxy-2'-fluoro ribonucleotide
  modified_base 8: mod_base = OTHER; note = 2'-O-methyl ribonucleotide
  modified_base 9..12: mod_base = OTHER; note = 2'-deoxy-2'-fluoro ribonucleotide
  modified_base 13..20: mod_base = OTHER; note = 2'-O-methyl ribonucleotide
  modified_base 1: mod_base = OTHER; note = phosphorothioate internucleotide linkage
  modified_base 20..21: mod_base = OTHER; note = phosphorothioate internucleotide linkage
ctggggtgcaggagtgctatn

SEQ ID NO: 267 - RNA, 21 nt, Synthetic construct
  source 1..21: mol_type = other RNA
  misc_feature 1: note = GalNAc3
  modified_base 1..6: mod_base = OTHER; note = 2'-O-methyl ribonucleotide
  modified_base 7: mod_base = OTHER; note = 2'-deoxy-2'-fluoro ribonucleotide
  modified_base 8: mod_base = OTHER; note = 2'-O-methyl ribonucleotide
  modified_base 9..12: mod_base = OTHER; note = 2'-deoxy-2'-fluoro ribonucleotide
  modified_base 13..21: mod_base = OTHER; note = 2'-O-methyl ribonucleotide
  modified_base 19..20: mod_base = OTHER; note = phosphorothioate internucleotide linkage
  modified_base 20..21: mod_base = OTHER; note = phosphorothioate internucleotide linkage
ggggtgcaggagtgctacctt

SEQ ID NO: 268 - RNA, 21 nt, Synthetic construct
  source 1..21: mol_type = other RNA
  misc_feature 1: note = GalNAc3
  modified_base 1..6: mod_base = OTHER; note = 2'-O-methyl ribonucleotide
  modified_base 7: mod_base = OTHER; note = 2'-deoxy-2'-fluoro ribonucleotide
  modified_base 8: mod_base = OTHER; note = 2'-O-methyl ribonucleotide
  modified_base 9..12: mod_base = OTHER; note = 2'-deoxy-2'-fluoro ribonucleotide
  modified_base 13..21: mod_base = OTHER; note = 2'-O-methyl ribonucleotide
  modified_base 19..20: mod_base = OTHER; note = phosphorothioate internucleotide linkage
  modified_base 20..21: mod_base = OTHER; note = phosphorothioate internucleotide linkage
gaatccagatcctgtggcatt

SEQ ID NO: 269 - RNA, 21 nt, Synthetic construct
  source 1..21: mol_type = other RNA
  misc_feature 1: note = GalNAc3
  modified_base 1..6: mod_base = OTHER; note = 2'-O-methyl ribonucleotide
  modified_base 7: mod_base = OTHER; note = 2'-deoxy-2'-fluoro ribonucleotide
  modified_base 8: mod_base = OTHER; note = 2'-O-methyl ribonucleotide
  modified_base 9..12: mod_base = OTHER; note = 2'-deoxy-2'-fluoro ribonucleotide
  modified_base 13..21: mod_base = OTHER; note = 2'-O-methyl ribonucleotide
  modified_base 19..20: mod_base = OTHER; note = phosphorothioate internucleotide linkage
  modified_base 20..21: mod_base = OTHER; note = phosphorothioate internucleotide linkage
cctgtggcagccccttatttt

SEQ ID NO: 270 - RNA, 21 nt, Synthetic construct
  source 1..21: mol_type = other RNA
  misc_feature 1: note = GalNAc3
  modified_base 1..6: mod_base = OTHER; note = 2'-O-methyl ribonucleotide
  modified_base 7: mod_base = OTHER; note = 2'-deoxy-2'-fluoro ribonucleotide
  modified_base 8: mod_base = OTHER; note = 2'-O-methyl ribonucleotide
  modified_base 9..12: mod_base = OTHER; note = 2'-deoxy-2'-fluoro ribonucleotide
  modified_base 13..21: mod_base = OTHER; note = 2'-O-methyl ribonucleotide
  modified_base 19..20: mod_base = OTHER; note = phosphorothioate internucleotide linkage
  modified_base 20..21: mod_base = OTHER; note = phosphorothioate internucleotide linkage
ggcagccccttattgttattt

SEQ ID NO: 271 - RNA, 21 nt, Synthetic construct
  source 1..21: mol_type = other RNA
  misc_feature 1: note = GalNAc3
  modified_base 1: mod_base = OTHER; note = 2'-deoxy-2'-fluoro ribonucleotide
  modified_base 2: mod_base = OTHER; note = 2'-O-methyl ribonucleotide
  modified_base 3: mod_base = OTHER; note = 2'-deoxy-2'-fluoro ribonucleotide
  modified_base 4: mod_base = OTHER; note = 2'-O-methyl ribonucleotide
  modified_base 5: mod_base = OTHER; note = 2'-deoxy-2'-fluoro ribonucleotide
  modified_base 6: mod_base = OTHER; note = 2'-O-methyl ribonucleotide
  modified_base 7: mod_base = OTHER; note = 2'-deoxy-2'-fluoro ribonucleotide
  modified_base 8: mod_base = OTHER; note = 2'-O-methyl ribonucleotide
  modified_base 9..12: mod_base = OTHER; note = 2'-deoxy-2'-fluoro ribonucleotide
  modified_base 13..14: mod_base = OTHER; note = 2'-O-methyl ribonucleotide
  modified_base 15: mod_base = OTHER; note = 2'-deoxy-2'-fluoro ribonucleotide
  modified_base 16: mod_base = OTHER; note = 2'-O-methyl ribonucleotide
  modified_base 17: mod_base = OTHER; note = 2'-deoxy-2'-fluoro ribonucleotide
  modified_base 18: mod_base = OTHER; note = 2'-O-methyl ribonucleotide
  modified_base 19: mod_base = OTHER; note = 2'-deoxy-2'-fluoro ribonucleotide
  modified_base 20: mod_base = OTHER; note = 2'-O-methyl ribonucleotide
  modified_base 21: mod_base = OTHER; note = 2'-deoxy-2'-fluoro ribonucleotide
  modified_base 19..20: mod_base = OTHER; note = phosphorothioate internucleotide linkage
  modified_base 20..21: mod_base = OTHER; note = phosphorothioate internucleotide linkage
ggcagccccttattgttattt

SEQ ID NO: 272 - RNA, 22 nt, Synthetic construct
  source 1..22: mol_type = other RNA
  misc_feature 1: note = GalNAc3
  misc_feature 1: note = invAb
  modified_base 2..7: mod_base = OTHER; note = 2'-O-methyl ribonucleotide
  modified_base 8: mod_base = OTHER; note = 2'-deoxy-2'-fluoro ribonucleotide
  modified_base 9: mod_base = OTHER; note = 2'-O-methyl ribonucleotide
  modified_base 10..13: mod_base = OTHER; note = 2'-deoxy-2'-fluoro ribonucleotide
  modified_base 14..22: mod_base = OTHER; note = 2'-O-methyl ribonucleotide
  modified_base 20..21: mod_base = OTHER; note = phosphorothioate internucleotide linkage
  modified_base 21..22: mod_base = OTHER; note = phosphorothioate internucleotide linkage
nggcagccccttattgttattt

SEQ ID NO: 273 - RNA, 21 nt, Synthetic construct
  source 1..21: mol_type = other RNA
  misc_feature 1: note = GalNAc3
  modified_base 1..8: mod_base = OTHER; note = 2'-O-methyl ribonucleotide
  modified_base 9: mod_base = OTHER; note = 2'-deoxy-2'-fluoro ribonucleotide
  modified_base 10: mod_base = OTHER; note = 2'-O-methyl ribonucleotide
  modified_base 11..14: mod_base = OTHER; note = 2'-deoxy-2'-fluoro ribonucleotide
  modified_base 15..21: mod_base = OTHER; note = 2'-O-methyl ribonucleotide
  modified_base 19..20: mod_base = OTHER; note = phosphorothioate internucleotide linkage
  modified_base 20..21: mod_base = OTHER; note = phosphorothioate internucleotide linkage
gtggcagccccttattgttat

SEQ ID NO: 274 - RNA, 22 nt, Synthetic construct
  source 1..22: mol_type = other RNA
  misc_feature 1: note = GalNAc3
  misc_feature 1: note = invAb
  misc_feature 22: note = invAb
  modified_base 2..9: mod_base = OTHER; note = 2'-O-methyl ribonucleotide
  modified_base 10: mod_base = OTHER; note = 2'-deoxy-2'-fluoro ribonucleotide
  modified_base 11: mod_base = OTHER; note = 2'-O-methyl ribonucleotide
  modified_base 12..15: mod_base = OTHER; note = 2'-deoxy-2'-fluoro ribonucleotide
  modified_base 16..21: mod_base = OTHER; note = 2'-O-methyl ribonucleotide
  modified_base 21..22: mod_base = OTHER; note = phosphorothioate internucleotide linkage
ngtggcagccccttattgttan

SEQ ID NO: 275 - RNA, 22 nt, Synthetic construct
  source 1..22: mol_type = other RNA
  misc_feature 1: note = GalNAc3
  misc_feature 1: note = invAb
  modified_base 2: mod_base = OTHER; note = 2'-deoxy-2'-fluoro ribonucleotide
  modified_base 3: mod_base = OTHER; note = 2'-O-methyl ribonucleotide
  modified_base 4: mod_base = OTHER; note = 2'-deoxy-2'-fluoro ribonucleotide
  modified_base 5: mod_base = OTHER; note = 2'-O-methyl ribonucleotide
  modified_base 6: mod_base = OTHER; note = 2'-deoxy-2'-fluoro ribonucleotide
  modified_base 7: mod_base = OTHER; note = 2'-O-methyl ribonucleotide
  modified_base 8: mod_base = OTHER; note = 2'-deoxy-2'-fluoro ribonucleotide
  modified_base 9: mod_base = OTHER; note = 2'-O-methyl ribonucleotide
  modified_base 10: mod_base = OTHER; note = 2'-deoxy-2'-fluoro ribonucleotide
  modified_base 11: mod_base = OTHER; note = 2'-O-methyl ribonucleotide
  modified_base 12..15: mod_base = OTHER; note = 2'-deoxy-2'-fluoro ribonucleotide
  modified_base 16..17: mod_base = OTHER; note = 2'-O-methyl ribonucleotide
  modified_base 18: mod_base = OTHER; note = 2'-deoxy-2'-fluoro ribonucleotide
  modified_base 19: mod_base = OTHER; note = 2'-O-methyl ribonucleotide
  modified_base 20: mod_base = OTHER; note = 2'-deoxy-2'-fluoro ribonucleotide
  modified_base 21: mod_base = OTHER; note = 2'-O-methyl ribonucleotide
  modified_base 22: mod_base = OTHER; note = 2'-deoxy-2'-fluoro ribonucleotide
  modified_base 20..21: mod_base = OTHER; note = phosphorothioate internucleotide linkage
  modified_base 21..22: mod_base = OTHER; note = phosphorothioate internucleotide linkage
ngtggcagccccttattgttat

SEQ ID NO: 276 - RNA, 21 nt, Synthetic construct
  source 1..21: mol_type = other RNA
  misc_feature 1: note = GalNAc3
  modified_base 1..6: mod_base = OTHER; note = 2'-O-methyl ribonucleotide
  modified_base 7: mod_base = OTHER; note = 2'-deoxy-2'-fluoro ribonucleotide
  modified_base 8: mod_base = OTHER; note = 2'-O-methyl ribonucleotide
  modified_base 9..12: mod_base = OTHER; note = 2'-deoxy-2'-fluoro ribonucleotide
  modified_base 13..21: mod_base = OTHER; note = 2'-O-methyl ribonucleotide
  modified_base 19..20: mod_base = OTHER; note = phosphorothioate internucleotide linkage
  modified_base 20..21: mod_base = OTHER; note = phosphorothioate internucleotide linkage
gcagccccttattgttatatt

SEQ ID NO: 277 - RNA, 21 nt, Synthetic construct
  source 1..21: mol_type = other RNA
  misc_feature 1: note = GalNAc3
  modified_base 1..6: mod_base = OTHER; note = 2'-O-methyl ribonucleotide
  modified_base 7: mod_base = OTHER; note = 2'-deoxy-2'-fluoro ribonucleotide
  modified_base 8: mod_base = OTHER; note = 2'-O-methyl ribonucleotide
  modified_base 9..12: mod_base = OTHER; note = 2'-deoxy-2'-fluoro ribonucleotide
  modified_base 13..21: mod_base = OTHER; note = 2'-O-methyl ribonucleotide
  modified_base 19..20: mod_base = OTHER; note = phosphorothioate internucleotide linkage
  modified_base 20..21: mod_base = OTHER; note = phosphorothioate internucleotide linkage
agccccttattgttatacgtt

SEQ ID NO: 278 - RNA, 21 nt, Synthetic construct
  source 1..21: mol_type = other RNA
  misc_feature 1: note = GalNAc3
  modified_base 1..6: mod_base = OTHER; note = 2'-O-methyl ribonucleotide
  modified_base 7: mod_base = OTHER; note = 2'-deoxy-2'-fluoro ribonucleotide
  modified_base 8: mod_base = OTHER; note = 2'-O-methyl ribonucleotide
  modified_base 9..12: mod_base = OTHER; note = 2'-deoxy-2'-fluoro ribonucleotide
  modified_base 13..21: mod_base = OTHER; note = 2'-O-methyl ribonucleotide
  modified_base 19..20: mod_base = OTHER; note = phosphorothioate internucleotide linkage
  modified_base 20..21: mod_base = OTHER; note = phosphorothioate internucleotide linkage
agccccttattgttatacatt

SEQ ID NO: 279 - RNA, 21 nt, Synthetic construct
  source 1..21: mol_type = other RNA
  misc_feature 1: note = GalNAc3
  modified_base 1..6: mod_base = OTHER; note = 2'-O-methyl ribonucleotide
  modified_base 7: mod_base = OTHER; note = 2'-deoxy-2'-fluoro ribonucleotide
  modified_base 8: mod_base = OTHER; note = 2'-O-methyl ribonucleotide
  modified_base 9..12: mod_base = OTHER; note = 2'-deoxy-2'-fluoro ribonucleotide
  modified_base 13..21: mod_base = OTHER; note = 2'-O-methyl ribonucleotide
  modified_base 19..20: mod_base = OTHER; note = phosphorothioate internucleotide linkage
  modified_base 20..21: mod_base = OTHER; note = phosphorothioate internucleotide linkage
gccccttattgttatacgatt

SEQ ID NO: 280 - RNA, 22 nt, Synthetic construct
  source 1..22: mol_type = other RNA
  misc_feature 1: note = GalNAc3
  misc_feature 1: note = invAb
  modified_base 2..7: mod_base = OTHER; note = 2'-O-methyl ribonucleotide
  modified_base 8: mod_base = OTHER; note = 2'-deoxy-2'-fluoro ribonucleotide
  modified_base 9: mod_base = OTHER; note = 2'-O-methyl ribonucleotide
  modified_base 10..13: mod_base = OTHER; note = 2'-deoxy-2'-fluoro ribonucleotide
  modified_base 14..22: mod_base = OTHER; note = 2'-O-methyl ribonucleotide
  modified_base 20..21: mod_base = OTHER; note = phosphorothioate internucleotide linkage
  modified_base 21..22: mod_base = OTHER; note = phosphorothioate internucleotide linkage
ngccccttattgttatacgatt

SEQ ID NO: 281 - RNA, 21 nt, Synthetic construct
  source 1..21: mol_type = other RNA
  misc_feature 1: note = GalNAc3
  misc_feature 21: note = invAb
  modified_base 1..6: mod_base = OTHER; note = 2'-O-methyl ribonucleotide
  modified_base 7: mod_base = OTHER; note = 2'-deoxy-2'-fluoro ribonucleotide
  modified_base 8: mod_base = OTHER; note = 2'-O-methyl ribonucleotide
  modified_base 9..12: mod_base = OTHER; note = 2'-deoxy-2'-fluoro ribonucleotide
  modified_base 13..20: mod_base = OTHER; note = 2'-O-methyl ribonucleotide
  modified_base 20..21: mod_base = OTHER; note = phosphorothioate internucleotide linkage
cagccccttattgttatacgn

SEQ ID NO: 282 - RNA, 21 nt, Synthetic construct
  source 1..21: mol_type = other RNA
  misc_feature 1: note = GalNAc3
  modified_base 1..6: mod_base = OTHER; note = 2'-O-methyl ribonucleotide
  modified_base 7: mod_base = OTHER; note = 2'-deoxy-2'-fluoro ribonucleotide
  modified_base 8: mod_base = OTHER; note = 2'-O-methyl ribonucleotide
  modified_base 9..12: mod_base = OTHER; note = 2'-deoxy-2'-fluoro ribonucleotide
  modified_base 13..21: mod_base = OTHER; note = 2'-O-methyl ribonucleotide
  modified_base 19..20: mod_base = OTHER; note = phosphorothioate internucleotide linkage
  modified_base 20..21: mod_base = OTHER; note = phosphorothioate internucleotide linkage
ccccttattgttatacgagtt

SEQ ID NO: 283 - RNA, 21 nt, Synthetic construct
  source 1..21: mol_type = other RNA
  misc_feature 1: note = GalNAc3
  modified_base 1..8: mod_base = OTHER; note = 2'-O-methyl ribonucleotide
  modified_base 9: mod_base = OTHER; note = 2'-deoxy-2'-fluoro ribonucleotide
  modified_base 10: mod_base = OTHER; note = 2'-O-methyl ribonucleotide
  modified_base 11..14: mod_base = OTHER; note = 2'-deoxy-2'-fluoro ribonucleotide
  modified_base 15..21: mod_base = OTHER; note = 2'-O-methyl ribonucleotide
  modified_base 19..20: mod_base = OTHER; note = phosphorothioate internucleotide linkage
  modified_base 20..21: mod_base = OTHER; note = phosphorothioate internucleotide linkage
agccccttattgttatacgag

SEQ ID NO: 284 - RNA, 22 nt, Synthetic construct
  source 1..22: mol_type = other RNA
  misc_feature 1: note = GalNAc3
  misc_feature 1: note = invAb
  misc_feature 22: note = invAb
  modified_base 2..9: mod_base = OTHER; note = 2'-O-methyl ribonucleotide
  modified_base 10: mod_base = OTHER; note = 2'-deoxy-2'-fluoro ribonucleotide
  modified_base 11: mod_base = OTHER; note = 2'-O-methyl ribonucleotide
  modified_base 12..15: mod_base = OTHER; note = 2'-deoxy-2'-fluoro ribonucleotide
  modified_base 16..21: mod_base = OTHER; note = 2'-O-methyl ribonucleotide
  modified_base 21..22: mod_base = OTHER; note = phosphorothioate internucleotide linkage
nagccccttattgttatacgan

SEQ ID NO: 285 - RNA, 21 nt, Synthetic construct
  source 1..21: mol_type = other RNA
  misc_feature 1: note = GalNAc3
  modified_base 1..6: mod_base = OTHER; note = 2'-O-methyl ribonucleotide
  modified_base 7: mod_base = OTHER; note = 2'-deoxy-2'-fluoro ribonucleotide
  modified_base 8: mod_base = OTHER; note = 2'-O-methyl ribonucleotide
  modified_base 9..12: mod_base = OTHER; note = 2'-deoxy-2'-fluoro ribonucleotide
  modified_base 13..21: mod_base = OTHER; note = 2'-O-methyl ribonucleotide
  modified_base 19..20: mod_base = OTHER; note = phosphorothioate internucleotide linkage
  modified_base 20..21: mod_base = OTHER; note = phosphorothioate internucleotide linkage
ccccttattgttatacgaatt

SEQ ID NO: 286 - RNA, 22 nt, Synthetic construct
  source 1..22: mol_type = other RNA
  misc_feature 1: note = GalNAc3
  misc_feature 1: note = invAb
  modified_base 2..9: mod_base = OTHER; note = 2'-O-methyl ribonucleotide
  modified_base 10: mod_base = OTHER; note = 2'-deoxy-2'-fluoro ribonucleotide
  modified_base 11: mod_base = OTHER; note = 2'-O-methyl ribonucleotide
  modified_base 12..15: mod_base = OTHER; note = 2'-deoxy-2'-fluoro ribonucleotide
  modified_base 16..22: mod_base = OTHER; note = 2'-O-methyl ribonucleotide
  modified_base 20..21: mod_base = OTHER; note = phosphorothioate internucleotide linkage
  modified_base 21..22: mod_base = OTHER; note = phosphorothioate internucleotide linkage
nagccccttattgttatacgag

SEQ ID NO: 287 - RNA, 21 nt, Synthetic construct
  source 1..21: mol_type = other RNA
  misc_feature 1: note = GalNAc3
  modified_base 1..6: mod_base = OTHER; note = 2'-O-methyl ribonucleotide
  modified_base 7: mod_base = OTHER; note = 2'-deoxy-2'-fluoro ribonucleotide
  modified_base 8: mod_base = OTHER; note = 2'-O-methyl ribonucleotide
  modified_base 9..12: mod_base = OTHER; note = 2'-deoxy-2'-fluoro ribonucleotide
  modified_base 13..21: mod_base = OTHER; note = 2'-O-methyl ribonucleotide
  modified_base 19..20: mod_base = OTHER; note = phosphorothioate internucleotide linkage
  modified_base 20..21: mod_base = OTHER; note = phosphorothioate internucleotide linkage
ctgacacaatgctcagacgtt

SEQ ID NO: 288 - RNA, 21 nt, Synthetic construct
  source 1..21: mol_type = other RNA
  misc_feature 1: note = GalNAc3
  modified_base 1..6: mod_base = OTHER; note = 2'-O-methyl ribonucleotide
  modified_base 7: mod_base = OTHER; note = 2'-deoxy-2'-fluoro ribonucleotide
  modified_base 8: mod_base = OTHER; note = 2'-O-methyl ribonucleotide
  modified_base 9..12: mod_base = OTHER; note = 2'-deoxy-2'-fluoro ribonucleotide
  modified_base 13..21: mod_base = OTHER; note = 2'-O-methyl ribonucleotide
  modified_base 19..20: mod_base = OTHER; note = phosphorothioate internucleotide linkage
  modified_base 20..21: mod_base = OTHER; note = phosphorothioate internucleotide linkage
ctgacacaatgctcagacatt

SEQ ID NO: 289 - RNA, 22 nt, Synthetic construct
  source 1..22: mol_type = other RNA
  misc_feature 1: note = GalNAc3
  misc_feature 1: note = invAb
  modified_base 2..7: mod_base = OTHER; note = 2'-O-methyl ribonucleotide
  modified_base 8: mod_base = OTHER; note = 2'-deoxy-2'-fluoro ribonucleotide
  modified_base 9: mod_base = OTHER; note = 2'-O-methyl ribonucleotide
  modified_base 10..13: mod_base = OTHER; note = 2'-deoxy-2'-fluoro ribonucleotide
  modified_base 14..22: mod_base = OTHER; note = 2'-O-methyl ribonucleotide
  modified_base 20..21: mod_base = OTHER; note = phosphorothioate internucleotide linkage
  modified_base 21..22: mod_base = OTHER; note = phosphorothioate internucleotide linkage
nctgacacaatgctcagacatt

SEQ ID NO: 290 - RNA, 21 nt, Synthetic construct
  source 1..21: mol_type = other RNA
  misc_feature 1: note = GalNAc3
  modified_base 1..8: mod_base = OTHER; note = 2'-O-methyl ribonucleotide
  modified_base 9: mod_base = OTHER; note = 2'-deoxy-2'-fluoro ribonucleotide
  modified_base 10: mod_base = OTHER; note = 2'-O-methyl ribonucleotide
  modified_base 11..14: mod_base = OTHER; note = 2'-deoxy-2'-fluoro ribonucleotide
  modified_base 15..21: mod_base = OTHER; note = 2'-O-methyl ribonucleotide
  modified_base 19..20: mod_base = OTHER; note = phosphorothioate internucleotide linkage
  modified_base 20..21: mod_base = OTHER; note = phosphorothioate internucleotide linkage
acctgacacaatgctcagaca

SEQ ID NO: 291 - RNA, 22 nt, Synthetic construct
  source 1..22: mol_type = other RNA
  misc_feature 1: note = GalNAc3
  misc_feature 1: note = invAb
  modified_base 2: mod_base = OTHER; note = 2'-deoxy-2'-fluoro ribonucleotide
  modified_base 3: mod_base = OTHER; note = 2'-O-methyl ribonucleotide
  modified_base 4: mod_base = OTHER; note = 2'-deoxy-2'-fluoro ribonucleotide
  modified_base 5: mod_base = OTHER; note = 2'-O-methyl ribonucleotide
  modified_base 6: mod_base = OTHER; note = 2'-deoxy-2'-fluoro ribonucleotide
  modified_base 7: mod_base = OTHER; note = 2'-O-methyl ribonucleotide
  modified_base 8: mod_base = OTHER; note = 2'-deoxy-2'-fluoro ribonucleotide
  modified_base 9: mod_base = OTHER; note = 2'-O-methyl ribonucleotide
  modified_base 10: mod_base = OTHER; note = 2'-deoxy-2'-fluoro ribonucleotide
  modified_base 11: mod_base = OTHER; note = 2'-O-methyl ribonucleotide
  modified_base 12: mod_base = OTHER; note = 2'-deoxy-2'-fluoro ribonucleotide
  modified_base 13: mod_base = OTHER; note = 2'-O-methyl ribonucleotide
  modified_base 14..15: mod_base = OTHER; note = 2'-deoxy-2'-fluoro ribonucleotide
  modified_base 16..17: mod_base = OTHER; note = 2'-O-methyl ribonucleotide
  modified_base 18: mod_base = OTHER; note = 2'-deoxy-2'-fluoro ribonucleotide
  modified_base 19: mod_base = OTHER; note = 2'-O-methyl ribonucleotide
  modified_base 20: mod_base = OTHER; note = 2'-deoxy-2'-fluoro ribonucleotide
  modified_base 21: mod_base = OTHER; note = 2'-O-methyl ribonucleotide
  modified_base 22: mod_base = OTHER; note = 2'-deoxy-2'-fluoro ribonucleotide
  modified_base 20..21: mod_base = OTHER; note = phosphorothioate internucleotide linkage
  modified_base 21..22: mod_base = OTHER; note = phosphorothioate internucleotide linkage
nacctgacacaatgctcagaca

SEQ ID NO: 292 - RNA, 22 nt, Synthetic construct
  source 1..22: mol_type = other RNA
  misc_feature 1: note = GalNAc3
  misc_feature 1: note = invAb
  misc_feature 22: note = invAb
  modified_base 2..9: mod_base = OTHER; note = 2'-O-methyl ribonucleotide
  modified_base 10: mod_base = OTHER; note = 2'-deoxy-2'-fluoro ribonucleotide
  modified_base 11: mod_base = OTHER; note = 2'-O-methyl ribonucleotide
  modified_base 12..15: mod_base = OTHER; note = 2'-deoxy-2'-fluoro ribonucleotide
  modified_base 16..21: mod_base = OTHER; note = 2'-O-methyl ribonucleotide
  modified_base 21..22: mod_base = OTHER; note = phosphorothioate internucleotide linkage
nacctgacacaatgctcagacn

SEQ ID NO: 293 - RNA, 22 nt, Synthetic construct
  source 1..22: mol_type = other RNA
  misc_feature 1: note = GalNAc3
  misc_feature 1: note = invAb
  modified_base 2..9: mod_base = OTHER; note = 2'-O-methyl ribonucleotide
  modified_base 10: mod_base = OTHER; note = 2'-deoxy-2'-fluoro ribonucleotide
  modified_base 11: mod_base = OTHER; note = 2'-O-methyl ribonucleotide
  modified_base 12..15: mod_base = OTHER; note = 2'-deoxy-2'-fluoro ribonucleotide
  modified_base 16..22: mod_base = OTHER; note = 2'-O-methyl ribonucleotide
  modified_base 20..21: mod_base = OTHER; note = phosphorothioate internucleotide linkage
  modified_base 21..22: mod_base = OTHER; note = phosphorothioate internucleotide linkage
nacctgacacaatgctcagaca

SEQ ID NO: 294 - RNA, 22 nt, Synthetic construct
  source 1..22: mol_type = other RNA
  misc_feature 1: note = GalNAc3
  misc_feature 1: note = invAb
  modified_base 2..7: mod_base = OTHER; note = 2'-O-methyl ribonucleotide
  modified_base 8: mod_base = OTHER; note = 2'-deoxy-2'-fluoro ribonucleotide
  modified_base 9: mod_base = OTHER; note = 2'-O-methyl ribonucleotide
  modified_base 10..13: mod_base = OTHER; note = 2'-deoxy-2'-fluoro ribonucleotide
  modified_base 14..22: mod_base = OTHER; note = 2'-O-methyl ribonucleotide
  modified_base 20..21: mod_base = OTHER; note = phosphorothioate internucleotide linkage
  modified_base 21..22: mod_base = OTHER; note = phosphorothioate internucleotide linkage
nctgacacaatgctcagacgtt

SEQ ID NO: 295 - RNA, 22 nt, Synthetic construct
  source 1..22: mol_type = other RNA
  misc_feature 1: note = GalNAc3
  misc_feature 1: note = invAb
  modified_base 2..9: mod_base = OTHER; note = 2'-O-methyl ribonucleotide
  modified_base 10: mod_base = OTHER; note = 2'-deoxy-2'-fluoro ribonucleotide
  modified_base 11: mod_base = OTHER; note = 2'-O-methyl ribonucleotide
  modified_base 12..15: mod_base = OTHER; note = 2'-deoxy-2'-fluoro ribonucleotide
  modified_base 16..22: mod_base = OTHER; note = 2'-O-methyl ribonucleotide
  modified_base 20..21: mod_base = OTHER; note = phosphorothioate internucleotide linkage
  modified_base 21..22: mod_base = OTHER; note = phosphorothioate internucleotide linkage
nacctgacacaatgctcagacg

SEQ ID NO: 296 - RNA, 21 nt, Synthetic construct
  source 1..21: mol_type = other RNA
  misc_feature 1: note = GalNAc3
  modified_base 1..8: mod_base = OTHER; note = 2'-O-methyl ribonucleotide
  modified_base 9: mod_base = OTHER; note = 2'-deoxy-2'-fluoro ribonucleotide
  modified_base 10: mod_base = OTHER; note = 2'-O-methyl ribonucleotide
  modified_base 11..14: mod_base = OTHER; note = 2'-deoxy-2'-fluoro ribonucleotide
  modified_base 15..21: mod_base = OTHER; note = 2'-O-methyl ribonucleotide
  modified_base 19..20: mod_base = OTHER; note = phosphorothioate internucleotide linkage
  modified_base 20..21: mod_base = OTHER; note = phosphorothioate internucleotide linkage
acctgacacaatgctcagacg

SEQ ID NO: 297 - RNA, 21 nt, Synthetic construct
  source 1..21: mol_type = other RNA
  misc_feature 1: note = GalNAc3
  modified_base 1..6: mod_base = OTHER; note = 2'-O-methyl ribonucleotide
  modified_base 7: mod_base = OTHER; note = 2'-deoxy-2'-fluoro ribonucleotide
  modified_base 8: mod_base = OTHER; note = 2'-O-methyl ribonucleotide
  modified_base 9..12: mod_base = OTHER; note = 2'-deoxy-2'-fluoro ribonucleotide
  modified_base 13..21: mod_base = OTHER; note = 2'-O-methyl ribonucleotide
  modified_base 19..20: mod_base = OTHER; note = phosphorothioate internucleotide linkage
  modified_base 20..21: mod_base = OTHER; note = phosphorothioate internucleotide linkage
gacacaatgctcagacgcatt

SEQ ID NO: 298 - RNA, 21 nt, Synthetic construct
  source 1..21: mol_type = other RNA
  misc_feature 1: note = GalNAc3
  modified_base 1..6: mod_base = OTHER; note = 2'-O-methyl ribonucleotide
  modified_base 7: mod_base = OTHER; note = 2'-deoxy-2'-fluoro ribonucleotide
  modified_base 8: mod_base = OTHER; note = 2'-O-methyl ribonucleotide
  modified_base 9..12: mod_base = OTHER; note = 2'-deoxy-2'-fluoro ribonucleotide
  modified_base 13..21: mod_base = OTHER; note = 2'-O-methyl ribonucleotide
  modified_base 19..20: mod_base = OTHER; note = phosphorothioate internucleotide linkage
  modified_base 20..21: mod_base = OTHER; note = phosphorothioate internucleotide linkage
acacaatgctcagacgcagtt

SEQ ID NO: 299 - RNA, 22 nt, Synthetic construct
  source 1..22: mol_type = other RNA
  misc_feature 1: note = GalNAc3
  misc_feature 1: note = invAb
  modified_base 2..9: mod_base = OTHER; note = 2'-O-methyl ribonucleotide
  modified_base 10: mod_base = OTHER; note = 2'-deoxy-2'-fluoro ribonucleotide
  modified_base 11: mod_base = OTHER; note = 2'-O-methyl ribonucleotide
  modified_base 12..15: mod_base = OTHER; note = 2'-deoxy-2'-fluoro ribonucleotide
  modified_base 16..22: mod_base = OTHER; note = 2'-O-methyl ribonucleotide
  modified_base 20..21: mod_base = OTHER; note = phosphorothioate internucleotide linkage
  modified_base 21..22: mod_base = OTHER; note = phosphorothioate internucleotide linkage
ntgacacaatgctcagacgcag

SEQ ID NO: 300 - RNA, 21 nt, Synthetic construct
  source 1..21: mol_type = other RNA
  misc_feature 1: note = GalNAc3
  modified_base 1..8: mod_base = OTHER; note = 2'-O-methyl ribonucleotide
  modified_base 9: mod_base = OTHER; note = 2'-deoxy-2'-fluoro ribonucleotide
  modified_base 10: mod_base = OTHER; note = 2'-O-methyl ribonucleotide
  modified_base 11..14: mod_base = OTHER; note = 2'-deoxy-2'-fluoro ribonucleotide
  modified_base 15..21: mod_base = OTHER; note = 2'-O-methyl ribonucleotide
  modified_base 1: mod_base = OTHER; note = phosphorothioate internucleotide linkage
  modified_base 19..20: mod_base = OTHER; note = phosphorothioate internucleotide linkage
  modified_base 20..21: mod_base = OTHER; note = phosphorothioate internucleotide linkage
tgacacaatgctcagacgcaa

SEQ ID NO: 301 - RNA, 21 nt, Synthetic construct
  source 1..21: mol_type = other RNA
  misc_feature 1: note = GalNAc3
  misc_feature 21: note = invAb
  modified_base 1..6: mod_base = OTHER; note = 2'-O-methyl ribonucleotide
  modified_base 7: mod_base = OTHER; note = 2'-deoxy-2'-fluoro ribonucleotide
  modified_base 8: mod_base = OTHER; note = 2'-O-methyl ribonucleotide
  modified_base 9..12: mod_base = OTHER; note = 2'-deoxy-2'-fluoro ribonucleotide
  modified_base 13..20: mod_base = OTHER; note = 2'-O-methyl ribonucleotide
  modified_base 1: mod_base = OTHER; note = phosphorothioate internucleotide linkage
  modified_base 20..21: mod_base = OTHER; note = phosphorothioate internucleotide linkage
tgacacaatgctcagacgcan

SEQ ID NO: 302 - RNA, 22 nt, Synthetic construct
  source 1..22: mol_type = other RNA
  misc_feature 1: note = GalNAc3
  misc_feature 2: note = invAb
  modified_base 2..9: mod_base = OTHER; note = 2'-O-methyl ribonucleotide
  modified_base 10: mod_base = OTHER; note = 2'-deoxy-2'-fluoro ribonucleotide
  modified_base 11: mod_base = OTHER; note = 2'-O-methyl ribonucleotide
  modified_base 12..15: mod_base = OTHER; note = 2'-deoxy-2'-fluoro ribonucleotide
  modified_base 16..22: mod_base = OTHER; note = 2'-O-methyl ribonucleotide
  modified_base 1: mod_base = OTHER; note = phosphorothioate internucleotide linkage
  modified_base 20..21: mod_base = OTHER; note = phosphorothioate internucleotide linkage
  modified_base 21..22: mod_base = OTHER; note = phosphorothioate internucleotide linkage
ntgacacaatgctcagacgcaa

SEQ ID NO: 303 - RNA, 21 nt, Synthetic construct
  source 1..21: mol_type = other RNA
  misc_feature 1: note = GalNAc3
  misc_feature 21: note = invAb
  modified_base 1..8: mod_base = OTHER; note = 2'-O-methyl ribonucleotide
  modified_base 9: mod_base = OTHER; note = 2'-deoxy-2'-fluoro ribonucleotide
  modified_base 10: mod_base = OTHER; note = 2'-O-methyl ribonucleotide
  modified_base 11..14: mod_base = OTHER; note = 2'-deoxy-2'-fluoro ribonucleotide
  modified_base 15..20: mod_base = OTHER; note = 2'-O-methyl ribonucleotide
  modified_base 1: mod_base = OTHER; note = phosphorothioate internucleotide linkage
  modified_base 20..21: mod_base = OTHER; note = phosphorothioate internucleotide linkage
tgacacaatgctcagacgcan

SEQ ID NO: 304 - RNA, 21 nt, Synthetic construct
  source 1..21: mol_type = other RNA
  misc_feature 1: note = GalNAc3
  misc_feature 21: note = invAb
  modified_base 1..6: mod_base = OTHER; note = 2'-O-methyl ribonucleotide
  modified_base 7: mod_base = OTHER; note = 2'-deoxy-2'-fluoro ribonucleotide
  modified_base 8: mod_base = OTHER; note = 2'-O-methyl ribonucleotide
  modified_base 9..12: mod_base = OTHER; note = 2'-deoxy-2'-fluoro ribonucleotide
  modified_base 13..20: mod_base = OTHER; note = 2'-O-methyl ribonucleotide
  modified_base 1: mod_base = OTHER; note = phosphorothioate internucleotide linkage
  modified_base 20..21: mod_base = OTHER; note = phosphorothioate internucleotide linkage
acacaatgctcagacgcaatn

SEQ ID NO: 305 - RNA, 22 nt, Synthetic construct
  source 1..22: mol_type = other RNA
  misc_feature 1: note = GalNAc3
  misc_feature 2: note = invAb
  modified_base 2..7: mod_base = OTHER; note = 2'-O-methyl ribonucleotide
  modified_base 8: mod_base = OTHER; note = 2'-deoxy-2'-fluoro ribonucleotide
  modified_base 9: mod_base = OTHER; note = 2'-O-methyl ribonucleotide
  modified_base 10..13: mod_base = OTHER; note = 2'-deoxy-2'-fluoro ribonucleotide
  modified_base 14..22: mod_base = OTHER; note = 2'-O-methyl ribonucleotide
  modified_base 1: mod_base = OTHER; note = phosphorothioate internucleotide linkage
  modified_base 20..21: mod_base = OTHER; note = phosphorothioate internucleotide linkage
  modified_base 21..22: mod_base = OTHER; note = phosphorothioate internucleotide linkage
nacacaatgctcagacgcaatt

SEQ ID NO: 306 - RNA, 22 nt, Synthetic construct
  source 1..22: mol_type = other RNA
  misc_feature 1: note = GalNAc3
  misc_feature 2: note = invAb
  modified_base 2..7: mod_base = OTHER; note = 2'-O-methyl ribonucleotide
  modified_base 8..11: mod_base = OTHER; note = 2'-deoxy-2'-fluoro ribonucleotide
  modified_base 12..22: mod_base = OTHER; note = 2'-O-methyl ribonucleotide
  modified_base 1: mod_base = OTHER; note = phosphorothioate internucleotide linkage
  modified_base 20..21: mod_base = OTHER; note = phosphorothioate internucleotide linkage
  modified_base 21..22: mod_base = OTHER; note = phosphorothioate internucleotide linkage
nacacaatgctcagacgcaatt

SEQ ID NO: 307 - RNA, 19 nt, Synthetic construct
  source 1..19: mol_type = other RNA
  misc_feature 1: note = GalNAc3
  misc_feature 19: note = invAb
  modified_base 1..6: mod_base = OTHER; note = 2'-O-methyl ribonucleotide
  modified_base 7: mod_base = OTHER; note = 2'-deoxy-2'-fluoro ribonucleotide
  modified_base 8: mod_base = OTHER; note = 2'-O-methyl ribonucleotide
  modified_base 9..12: mod_base = OTHER; note = 2'-deoxy-2'-fluoro ribonucleotide
  modified_base 13..18: mod_base = OTHER; note = 2'-O-methyl ribonucleotide
  modified_base 1: mod_base = OTHER; note = phosphorothioate internucleotide linkage
  modified_base 18..19: mod_base = OTHER; note = phosphorothioate internucleotide linkage
acacaatgctcagacgcan

SEQ ID NO: 308 - RNA, 20 nt, Synthetic construct
  source 1..20: mol_type = other RNA
  misc_feature 1: note = GalNAc3
  misc_feature 2: note = invAb
  modified_base 2..7: mod_base = OTHER; note = 2'-O-methyl ribonucleotide
  modified_base 8: mod_base = OTHER; note = 2'-deoxy-2'-fluoro ribonucleotide
  modified_base 9: mod_base = OTHER; note = 2'-O-methyl ribonucleotide
  modified_base 10..13: mod_base = OTHER; note = 2'-deoxy-2'-fluoro ribonucleotide
  modified_base 14..20: mod_base = OTHER; note = 2'-O-methyl ribonucleotide
  modified_base 1: mod_base = OTHER; note = phosphorothioate internucleotide linkage
  modified_base 18..19: mod_base = OTHER; note = phosphorothioate internucleotide linkage
  modified_base 19..20: mod_base = OTHER; note = phosphorothioate internucleotide linkage
nacacaatgctcagacgcaa

SEQ ID NO: 309 - RNA, 20 nt, Synthetic construct
  source 1..20: mol_type = other RNA
  misc_feature 1: note = GalNAc3
  misc_feature 2: note = invAb
  modified_base 2..7: mod_base = OTHER; note = 2'-O-methyl ribonucleotide
  modified_base 8..11: mod_base = OTHER; note = 2'-deoxy-2'-fluoro ribonucleotide
  modified_base 12..20: mod_base = OTHER; note = 2'-O-methyl ribonucleotide
  modified_base 1: mod_base = OTHER; note = phosphorothioate internucleotide linkage
  modified_base 18..19: mod_base = OTHER; note = phosphorothioate internucleotide linkage
  modified_base 19..20: mod_base = OTHER; note = phosphorothioate internucleotide linkage
nacacaatgctcagacgcaa

SEQ ID NO: 310 - RNA, 22 nt, Synthetic construct
  source 1..22: mol_type = other RNA
  misc_feature 1: note = GalNAc3
  misc_feature 2: note = invAb
  modified_base 2..7: mod_base = OTHER; note = 2'-O-methyl ribonucleotide
  modified_base 8: mod_base = OTHER; note = 2'-deoxy-2'-fluoro ribonucleotide
  modified_base 9: mod_base = OTHER; note = 2'-O-methyl ribonucleotide
  modified_base 10..13: mod_base = OTHER; note = 2'-deoxy-2'-fluoro ribonucleotide
  modified_base 14..22: mod_base = OTHER; note = 2'-O-methyl ribonucleotide
  modified_base 1: mod_base = OTHER; note = phosphorothioate internucleotide linkage
  modified_base 20..21: mod_base = OTHER; note = phosphorothioate internucleotide linkage
  modified_base 21..22: mod_base = OTHER; note = phosphorothioate internucleotide linkage
ntgacacaatgctcagacgcaa

SEQ ID NO: 311 - RNA, 21 nt, Synthetic construct
  source 1..21: mol_type = other RNA
  misc_feature 1: note = GalNAc3
  misc_feature 21: note = invAb
  modified_base 1..8: mod_base = OTHER; note = 2'-O-methyl ribonucleotide
  modified_base 9: mod_base = OTHER; note = 2'-deoxy-2'-fluoro ribonucleotide
  modified_base 10: mod_base = OTHER; note = 2'-O-methyl ribonucleotide
  modified_base 11..14: mod_base = OTHER; note = 2'-deoxy-2'-fluoro ribonucleotide
  modified_base 15..20: mod_base = OTHER; note = 2'-O-methyl ribonucleotide
  modified_base 1: mod_base = OTHER; note = phosphorothioate internucleotide linkage
  modified_base 20..21: mod_base = OTHER; note = phosphorothioate internucleotide linkage
tgacacaatgctcagacgcan

SEQ ID NO: 312 - RNA, 21 nt, Synthetic construct
  source 1..21: mol_type = other RNA
  misc_feature 1: note = GalNAc3
  modified_base 1..6: mod_base = OTHER; note = 2'-O-methyl ribonucleotide
  modified_base 7: mod_base = OTHER; note = 2'-deoxy-2'-fluoro ribonucleotide
  modified_base 8: mod_base = OTHER; note = 2'-O-methyl ribonucleotide
  modified_base 9..12: mod_base = OTHER; note = 2'-deoxy-2'-fluoro ribonucleotide
  modified_base 13..21: mod_base = OTHER; note = 2'-O-methyl ribonucleotide
  modified_base 19..20: mod_base = OTHER; note = phosphorothioate internucleotide linkage
  modified_base 20..21: mod_base = OTHER; note = phosphorothioate internucleotide linkage
cctagaggctccttctgaatt

SEQ ID NO: 313 - RNA, 21 nt, Synthetic construct
  source 1..21: mol_type = other RNA
  misc_feature 1: note = GalNAc3
  modified_base 1: mod_base = OTHER; note = 2'-deoxy-2'-fluoro ribonucleotide
  modified_base 2: mod_base = OTHER; note = 2'-O-methyl ribonucleotide
  modified_base 3: mod_base = OTHER; note = 2'-deoxy-2'-fluoro ribonucleotide
  modified_base 4: mod_base = OTHER; note = 2'-O-methyl ribonucleotide
  modified_base 5: mod_base = OTHER; note = 2'-deoxy-2'-fluoro ribonucleotide
  modified_base 6: mod_base = OTHER; note = 2'-O-methyl ribonucleotide
  modified_base 7: mod_base = OTHER; note = 2'-deoxy-2'-fluoro ribonucleotide
  modified_base 8: mod_base = OTHER; note = 2'-O-methyl ribonucleotide
  modified_base 9..12: mod_base = OTHER; note = 2'-deoxy-2'-fluoro ribonucleotide
  modified_base 13..14: mod_base = OTHER; note = 2'-O-methyl ribonucleotide
  modified_base 15: mod_base = OTHER; note = 2'-deoxy-2'-fluoro ribonucleotide
  modified_base 16: mod_base = OTHER; note = 2'-O-methyl ribonucleotide
  modified_base 17: mod_base = OTHER; note = 2'-deoxy-2'-fluoro ribonucleotide
  modified_base 18: mod_base = OTHER; note = 2'-O-methyl ribonucleotide
  modified_base 19: mod_base = OTHER; note = 2'-deoxy-2'-fluoro ribonucleotide
  modified_base 20: mod_base = OTHER; note = 2'-O-methyl ribonucleotide
  modified_base 21: mod_base = OTHER; note = 2'-deoxy-2'-fluoro ribonucleotide
  modified_base 19..20: mod_base = OTHER; note = phosphorothioate internucleotide linkage
  modified_base 20..21: mod_base = OTHER; note = phosphorothioate internucleotide linkage
cctagaggctccttctgaatt

SEQ ID NO: 314 - RNA, 21 nt, Synthetic construct
  source 1..21: mol_type = other RNA
  misc_feature 1: note = GalNAc3
  modified_base 1..8: mod_base = OTHER; note = 2'-O-methyl ribonucleotide
  modified_base 9: mod_base = OTHER; note = 2'-deoxy-2'-fluoro ribonucleotide
  modified_base 10: mod_base = OTHER; note = 2'-O-methyl ribonucleotide
  modified_base 11..14: mod_base = OTHER; note = 2'-deoxy-2'-fluoro ribonucleotide
  modified_base 15..21: mod_base = OTHER; note = 2'-O-methyl ribonucleotide
  modified_base 19..20: mod_base = OTHER; note = phosphorothioate internucleotide linkage
  modified_base 20..21: mod_base = OTHER; note = phosphorothioate internucleotide linkage
agcctagaggctccttctgaa

SEQ ID NO: 315 - RNA, 22 nt, Synthetic construct
  source 1..22: mol_type = other RNA
  misc_feature 1: note = GalNAc3
  misc_feature 1: note = invAb
  modified_base 2..7: mod_base = OTHER; note = 2'-O-methyl ribonucleotide
  modified_base 8: mod_base = OTHER; note = 2'-deoxy-2'-fluoro ribonucleotide
  modified_base 9: mod_base = OTHER; note = 2'-O-methyl ribonucleotide
  modified_base 10..13: mod_base = OTHER; note = 2'-deoxy-2'-fluoro ribonucleotide
  modified_base 14..22: mod_base = OTHER; note = 2'-O-methyl ribonucleotide
  modified_base 20..21: mod_base = OTHER; note = phosphorothioate internucleotide linkage
  modified_base 21..22: mod_base = OTHER; note = phosphorothioate internucleotide linkage
ncctagaggctccttctgaatt

SEQ ID NO: 316 - RNA, 22 nt, Synthetic construct
  source 1..22: mol_type = other RNA
  misc_feature 1: note = GalNAc3
  misc_feature 1: note = invAb
  misc_feature 22: note = invAb
  modified_base 2..9: mod_base = OTHER; note = 2'-O-methyl ribonucleotide
  modified_base 10: mod_base = OTHER; note = 2'-deoxy-2'-fluoro ribonucleotide
  modified_base 11: mod_base = OTHER; note = 2'-O-methyl ribonucleotide
  modified_base 12..15: mod_base = OTHER; note = 2'-deoxy-2'-fluoro ribonucleotide
  modified_base 16..21: mod_base = OTHER; note = 2'-O-methyl ribonucleotide
  modified_base 21..22: mod_base = OTHER; note = phosphorothioate internucleotide linkage
nagcctagaggctccttctgan

SEQ ID NO: 317 - RNA, 22 nt, Synthetic construct
  source 1..22: mol_type = other RNA
  misc_feature 1: note = GalNAc3
  misc_feature 1: note = invAb
  modified_base 2..9: mod_base = OTHER; note = 2'-O-methyl ribonucleotide
  modified_base 10: mod_base = OTHER; note = 2'-deoxy-2'-fluoro ribonucleotide
  modified_base 11: mod_base = OTHER; note = 2'-O-methyl ribonucleotide
  modified_base 12..15: mod_base = OTHER; note = 2'-deoxy-2'-fluoro ribonucleotide
  modified_base 16..22: mod_base = OTHER; note = 2'-O-methyl ribonucleotide
  modified_base 20..21: mod_base = OTHER; note = phosphorothioate internucleotide linkage
  modified_base 21..22: mod_base = OTHER; note = phosphorothioate internucleotide linkage
nagcctagaggctccttctgaa

SEQ ID NO: 318 - RNA, 22 nt, Synthetic construct
  source 1..22: mol_type = other RNA
  misc_feature 1: note = GalNAc3
  misc_feature 2: note = invAb
  modified_base 2..7: mod_base = OTHER; note = 2'-O-methyl ribonucleotide
  modified_base 8: mod_base = OTHER; note = 2'-deoxy-2'-fluoro ribonucleotide
  modified_base 9: mod_base = OTHER; note = 2'-O-methyl ribonucleotide
  modified_base 10..13: mod_base = OTHER; note = 2'-deoxy-2'-fluoro ribonucleotide
  modified_base 14..22: mod_base = OTHER; note = 2'-O-methyl ribonucleotide
  modified_base 1: mod_base = OTHER; note = phosphorothioate internucleotide linkage
  modified_base 20..21: mod_base = OTHER; note = phosphorothioate internucleotide linkage
  modified_base 21..22: mod_base = OTHER; note = phosphorothioate internucleotide linkage
ncctagaggctccttctgaatt

SEQ ID NO: 319 - RNA, 21 nt, Synthetic construct
  source 1..21: mol_type = other RNA
  misc_feature 1: note = GalNAc3
  misc_feature 21: note = invAb
  modified_base 1..6: mod_base = OTHER; note = 2'-O-methyl ribonucleotide
  modified_base 7: mod_base = OTHER; note = 2'-deoxy-2'-fluoro ribonucleotide
  modified_base 8: mod_base = OTHER; note = 2'-O-methyl ribonucleotide
  modified_base 9..12: mod_base = OTHER; note = 2'-deoxy-2'-fluoro ribonucleotide
  modified_base 13..20: mod_base = OTHER; note = 2'-O-methyl ribonucleotide
  modified_base 1: mod_base = OTHER; note = phosphorothioate internucleotide linkage
  modified_base 20..21: mod_base = OTHER; note = phosphorothioate internucleotide linkage
agcctagaggctccttctgan

SEQ ID NO: 320 - RNA, 21 nt, Synthetic construct
  source 1..21: mol_type = other RNA
  misc_feature 1: note = GalNAc3
  modified_base 1..6: mod_base = OTHER; note = 2'-O-methyl ribonucleotide
  modified_base 7: mod_base = OTHER; note = 2'-deoxy-2'-fluoro ribonucleotide
  modified_base 8: mod_base = OTHER; note = 2'-O-methyl ribonucleotide
  modified_base 9..12: mod_base = OTHER; note = 2'-deoxy-2'-fluoro ribonucleotide
  modified_base 13..21: mod_base = OTHER; note = 2'-O-methyl ribonucleotide
  modified_base 19..20: mod_base = OTHER; note = phosphorothioate internucleotide linkage
  modified_base 20..21: mod_base = OTHER; note = phosphorothioate internucleotide linkage
agaggctccttctgaacaatt

SEQ ID NO: 321 - RNA, 21 nt, Synthetic construct
  source 1..21: mol_type = other RNA
  misc_feature 1: note = GalNAc3
  modified_base 1..6: mod_base = OTHER; note = 2'-O-methyl ribonucleotide
  modified_base 7: mod_base = OTHER; note = 2'-deoxy-2'-fluoro ribonucleotide
  modified_base 8: mod_base = OTHER; note = 2'-O-methyl ribonucleotide
  modified_base 9..12: mod_base = OTHER; note = 2'-deoxy-2'-fluoro ribonucleotide
  modified_base 13..21: mod_base = OTHER; note = 2'-O-methyl ribonucleotide
  modified_base 19..20: mod_base = OTHER; note = phosphorothioate internucleotide linkage
  modified_base 20..21: mod_base = OTHER; note = phosphorothioate internucleotide linkage
agcaccaactgagcaaagatt

SEQ ID NO: 322 - RNA, 21 nt, Synthetic construct
  source 1..21: mol_type = other RNA
  misc_feature 1: note = GalNAc3
  modified_base 1..6: mod_base = OTHER; note = 2'-O-methyl ribonucleotide
  modified_base 7: mod_base = OTHER; note = 2'-deoxy-2'-fluoro ribonucleotide
  modified_base 8: mod_base = OTHER; note = 2'-O-methyl ribonucleotide
  modified_base 9..12: mod_base = OTHER; note = 2'-deoxy-2'-fluoro ribonucleotide
  modified_base 13..21: mod_base = OTHER; note = 2'-O-methyl ribonucleotide
  modified_base 19..20: mod_base = OTHER; note = phosphorothioate internucleotide linkage
  modified_base 20..21: mod_base = OTHER; note = phosphorothioate internucleotide linkage
aaatccagatcctgtggcatt

SEQ ID NO: 323 - RNA, 21 nt, Synthetic construct
  source 1..21: mol_type = other RNA
  misc_feature 1: note = GalNAc3
  modified_base 1: mod_base = OTHER; note = 2'-deoxy-2'-fluoro ribonucleotide
  modified_base 2: mod_base = OTHER; note = 2'-O-methyl ribonucleotide
  modified_base 3: mod_base = OTHER; note = 2'-deoxy-2'-fluoro ribonucleotide
  modified_base 4: mod_base = OTHER; note = 2'-O-methyl ribonucleotide
  modified_base 5: mod_base = OTHER; note = 2'-deoxy-2'-fluoro ribonucleotide
  modified_base 6: mod_base = OTHER; note = 2'-O-methyl ribonucleotide
  modified_base 7: mod_base = OTHER; note = 2'-deoxy-2'-fluoro ribonucleotide
  modified_base 8: mod_base = OTHER; note = 2'-O-methyl ribonucleotide
  modified_base 9..12: mod_base = OTHER; note = 2'-deoxy-2'-fluoro ribonucleotide
  modified_base 13..14: mod_base = OTHER; note = 2'-O-methyl ribonucleotide
  modified_base 15: mod_base = OTHER; note = 2'-deoxy-2'-fluoro ribonucleotide
  modified_base 16: mod_base = OTHER; note = 2'-O-methyl ribonucleotide
  modified_base 17: mod_base = OTHER; note = 2'-deoxy-2'-fluoro ribonucleotide
  modified_base 18: mod_base = OTHER; note = 2'-O-methyl ribonucleotide
  modified_base 19: mod_base = OTHER; note = 2'-deoxy-2'-fluoro ribonucleotide
  modified_base 20: mod_base = OTHER; note = 2'-O-methyl ribonucleotide
  modified_base 21: mod_base = OTHER; note = 2'-deoxy-2'-fluoro ribonucleotide
  modified_base 19..20: mod_base = OTHER; note = phosphorothioate internucleotide linkage
  modified_base 20..21: mod_base = OTHER; note = phosphorothioate internucleotide linkage
ggcagccccttggtgttattt

SEQ ID NO: 324 - RNA, 21 nt, Synthetic construct
  source 1..21: mol_type = other RNA
  misc_feature 1: note = GalNAc3
  modified_base 1..6: mod_base = OTHER; note = 2'-O-methyl ribonucleotide
  modified_base 7: mod_base = OTHER; note = 2'-deoxy-2'-fluoro ribonucleotide
  modified_base 8: mod_base = OTHER; note = 2'-O-methyl ribonucleotide
  modified_base 9..12: mod_base = OTHER; note = 2'-deoxy-2'-fluoro ribonucleotide
  modified_base 13..21: mod_base = OTHER; note = 2'-O-methyl ribonucleotide
  modified_base 19..20: mod_base = OTHER; note = phosphorothioate internucleotide linkage
  modified_base 20..21: mod_base = OTHER; note = phosphorothioate internucleotide linkage
agaacttgccaagcttggttt

SEQ ID NO: 325 - RNA, 22 nt, Synthetic construct
  source 1..22: mol_type = other RNA
  misc_feature 1: note = GalNAc3
  misc_feature 1: note = invAb
  modified_base 2..7: mod_base = OTHER; note = 2'-O-methyl ribonucleotide
  modified_base 8: mod_base = OTHER; note = 2'-deoxy-2'-fluoro ribonucleotide
  modified_base 9: mod_base = OTHER; note = 2'-O-methyl ribonucleotide
  modified_base 10..13: mod_base = OTHER; note = 2'-deoxy-2'-fluoro ribonucleotide
  modified_base 14..22: mod_base = OTHER; note = 2'-O-methyl ribonucleotide
  modified_base 20..21: mod_base = OTHER; note = phosphorothioate internucleotide linkage
  modified_base 21..22: mod_base = OTHER; note = phosphorothioate internucleotide linkage
nagaacttgccaagcttggttt

SEQ ID NO: 326 - RNA, 21 nt, Synthetic construct
  source 1..21: mol_type = other RNA
  misc_feature 1: note = GalNAc3
  modified_base 1..8: mod_base = OTHER; note = 2'-O-methyl ribonucleotide
  modified_base 9: mod_base = OTHER; note = 2'-deoxy-2'-fluoro ribonucleotide
  modified_base 10: mod_base = OTHER; note = 2'-O-methyl ribonucleotide
  modified_base 11..14: mod_base = OTHER; note = 2'-deoxy-2'-fluoro ribonucleotide
  modified_base 15..21: mod_base = OTHER; note = 2'-O-methyl ribonucleotide
  modified_base 19..20: mod_base = OTHER; note = phosphorothioate internucleotide linkage
  modified_base 20..21: mod_base = OTHER; note = phosphorothioate internucleotide linkage
gaagaacttgccaagcttggt

SEQ ID NO: 327 - RNA, 22 nt, Synthetic construct
  source 1..22: mol_type = other RNA
  misc_feature 1: note = GalNAc3
  misc_feature 1: note = invAb
  misc_feature 22: note = invAb
  modified_base 2..9: mod_base = OTHER; note = 2'-O-methyl ribonucleotide
  modified_base 10: mod_base = OTHER; note = 2'-deoxy-2'-fluoro ribonucleotide
  modified_base 11: mod_base = OTHER; note = 2'-O-methyl ribonucleotide
  modified_base 12..15: mod_base = OTHER; note = 2'-deoxy-2'-fluoro ribonucleotide
  modified_base 16..21: mod_base = OTHER; note = 2'-O-methyl ribonucleotide
  modified_base 21..22: mod_base = OTHER; note = phosphorothioate internucleotide linkage
ngaagaacttgccaagcttggn

SEQ ID NO: 328 - RNA, 22 nt, Synthetic construct
  source 1..22: mol_type = other RNA
  misc_feature 1: note = GalNAc3
  misc_feature 1: note = invAb
  modified_base 2..9: mod_base = OTHER; note = 2'-O-methyl ribonucleotide
  modified_base 10: mod_base = OTHER; note = 2'-deoxy-2'-fluoro ribonucleotide
  modified_base 11: mod_base = OTHER; note = 2'-O-methyl ribonucleotide
  modified_base 12..15: mod_base = OTHER; note = 2'-deoxy-2'-fluoro ribonucleotide
  modified_base 16..22: mod_base = OTHER; note = 2'-O-methyl ribonucleotide
  modified_base 20..21: mod_base = OTHER; note = phosphorothioate internucleotide linkage
  modified_base 21..22: mod_base = OTHER; note = phosphorothioate internucleotide linkage
ngaagaacttgccaagcttggt

SEQ ID NO: 329 - RNA, 21 nt, Synthetic construct
  source 1..21: mol_type = other RNA
  misc_feature 1: note = GalNAc3
  modified_base 1..6: mod_base = OTHER; note = 2'-O-methyl ribonucleotide
  modified_base 7: mod_base = OTHER; note = 2'-deoxy-2'-fluoro ribonucleotide
  modified_base 8: mod_base = OTHER; note = 2'-O-methyl ribonucleotide
  modified_base 9..12: mod_base = OTHER; note = 2'-deoxy-2'-fluoro ribonucleotide
  modified_base 13..21: mod_base = OTHER; note = 2'-O-methyl ribonucleotide
  modified_base 19..20: mod_base = OTHER; note = phosphorothioate internucleotide linkage
  modified_base 20..21: mod_base = OTHER; note = phosphorothioate internucleotide linkage
gaacttgccaagcttggtttt

SEQ ID NO: 330 - RNA, 22 nt, Synthetic construct
  source 1..22: mol_type = other RNA
  misc_feature 1: note = GalNAc3
  misc_feature 1: note = invAb
  modified_base 2..7: mod_base = OTHER; note = 2'-O-methyl ribonucleotide
  modified_base 8: mod_base = OTHER; note = 2'-deoxy-2'-fluoro ribonucleotide
  modified_base 9: mod_base = OTHER; note = 2'-O-methyl ribonucleotide
  modified_base 10..13: mod_base = OTHER; note = 2'-deoxy-2'-fluoro ribonucleotide
  modified_base 14..22: mod_base = OTHER; note = 2'-O-methyl ribonucleotide
  modified_base 20..21: mod_base = OTHER; note = phosphorothioate internucleotide linkage
  modified_base 21..22: mod_base = OTHER; note = phosphorothioate internucleotide linkage
ngaacttgccaagcttggtttt

SEQ ID NO: 331 - RNA, 21 nt, Synthetic construct
  source 1..21: mol_type = other RNA
  misc_feature 1: note = GalNAc3
  modified_base 1..8: mod_base = OTHER; note = 2'-O-methyl ribonucleotide
  modified_base 9: mod_base = OTHER; note = 2'-deoxy-2'-fluoro ribonucleotide
  modified_base 10: mod_base = OTHER; note = 2'-O-methyl ribonucleotide
  modified_base 11..14: mod_base = OTHER; note = 2'-deoxy-2'-fluoro ribonucleotide
  modified_base 15..21: mod_base = OTHER; note = 2'-O-methyl ribonucleotide
  modified_base 19..20: mod_base = OTHER; note = phosphorothioate internucleotide linkage
  modified_base 20..21: mod_base = OTHER; note = phosphorothioate internucleotide linkage
aagaacttgccaagcttggtt

SEQ ID NO: 332 - RNA, 22 nt, Synthetic construct
  source 1..22: mol_type = other RNA
  misc_feature 1: note = GalNAc3
  misc_feature 1: note = invAb
  misc_feature 22: note = invAb
  modified_base 2..9: mod_base = OTHER; note = 2'-O-methyl ribonucleotide
  modified_base 10: mod_base = OTHER; note = 2'-deoxy-2'-fluoro ribonucleotide
  modified_base 11: mod_base = OTHER; note = 2'-O-methyl ribonucleotide
  modified_base 12..15: mod_base = OTHER; note = 2'-deoxy-2'-fluoro ribonucleotide
  modified_base 16..21: mod_base = OTHER; note = 2'-O-methyl ribonucleotide
  modified_base 21..22: mod_base = OTHER; note = phosphorothioate internucleotide linkage
naagaacttgccaagcttggtn

SEQ ID NO: 333 - RNA, 22 nt, Synthetic construct
  source 1..22: mol_type = other RNA
  misc_feature 1: note = GalNAc3
  misc_feature 1: note = invAb
  modified_base 2..9: mod_base = OTHER; note = 2'-O-methyl ribonucleotide
  modified_base 10: mod_base = OTHER; note = 2'-deoxy-2'-fluoro ribonucleotide
  modified_base 11: mod_base = OTHER; note = 2'-O-methyl ribonucleotide
  modified_base 12..15: mod_base = OTHER; note = 2'-deoxy-2'-fluoro ribonucleotide
  modified_base 16..22: mod_base = OTHER; note = 2'-O-methyl ribonucleotide
  modified_base 20..21: mod_base = OTHER; note = phosphorothioate internucleotide linkage
  modified_base 21..22: mod_base = OTHER; note = phosphorothioate internucleotide linkage
naagaacttgccaagcttggtt

SEQ ID NO: 334 - RNA, 21 nt, Synthetic construct
  source 1..21: mol_type = other RNA
  misc_feature 1: note = GalNAc3
  modified_base 1..6: mod_base = OTHER; note = 2'-O-methyl ribonucleotide
  modified_base 7: mod_base = OTHER; note = 2'-deoxy-2'-fluoro ribonucleotide
  modified_base 8: mod_base = OTHER; note = 2'-O-methyl ribonucleotide
  modified_base 9..12: mod_base = OTHER; note = 2'-deoxy-2'-fluoro ribonucleotide
  modified_base 13..21: mod_base = OTHER; note = 2'-O-methyl ribonucleotide
  modified_base 19..20: mod_base = OTHER; note = phosphorothioate internucleotide linkage
  modified_base 20..21: mod_base = OTHER; note = phosphorothioate internucleotide linkage
acaccagcatagtcggacttt

SEQ ID NO: 335 - RNA, 21 nt, Synthetic construct
  source 1..21: mol_type = other RNA
  misc_feature 1: note = GalNAc3
  modified_base 1..6: mod_base = OTHER; note = 2'-O-methyl ribonucleotide
  modified_base 7: mod_base = OTHER; note = 2'-deoxy-2'-fluoro ribonucleotide
  modified_base 8: mod_base = OTHER; note = 2'-O-methyl ribonucleotide
  modified_base 9..12: mod_base = OTHER; note = 2'-deoxy-2'-fluoro ribonucleotide
  modified_base 13..21: mod_base = OTHER; note = 2'-O-methyl ribonucleotide
  modified_base 19..20: mod_base = OTHER; note = phosphorothioate internucleotide linkage
  modified_base 20..21: mod_base = OTHER; note = phosphorothioate internucleotide linkage
caccagcatagtcggaccttt

SEQ ID NO: 336 - RNA, 21 nt, Synthetic construct
  source 1..21: mol_type = other RNA
  misc_feature 1: note = GalNAc3
  modified_base 1..6: mod_base = OTHER; note = 2'-O-methyl ribonucleotide
  modified_base 7: mod_base = OTHER; note = 2'-deoxy-2'-fluoro ribonucleotide
  modified_base 8: mod_base = OTHER; note = 2'-O-methyl ribonucleotide
  modified_base 9..12: mod_base = OTHER; note = 2'-deoxy-2'-fluoro ribonucleotide
  modified_base 13..21: mod_base = OTHER; note = 2'-O-methyl ribonucleotide
  modified_base 19..20: mod_base = OTHER; note = phosphorothioate internucleotide linkage
  modified_base 20..21: mod_base = OTHER; note = phosphorothioate internucleotide linkage
cgcccttggtgttacaccatt

SEQ ID NO: 337 - RNA, 22 nt, Synthetic construct
  source 1..22: mol_type = other RNA
  misc_feature 1: note = GalNAc3
  misc_feature 1: note = invAb
  modified_base 2..9: mod_base = OTHER; note = 2'-O-methyl ribonucleotide
  modified_base 10: mod_base = OTHER; note = 2'-deoxy-2'-fluoro ribonucleotide
  modified_base 11: mod_base = OTHER; note = 2'-O-methyl ribonucleotide
  modified_base 12..15: mod_base = OTHER; note = 2'-deoxy-2'-fluoro ribonucleotide
  modified_base 16..22: mod_base = OTHER; note = 2'-O-methyl ribonucleotide
  modified_base 20..21: mod_base = OTHER; note = phosphorothioate internucleotide linkage
  modified_base 21..22: mod_base = OTHER; note = phosphorothioate internucleotide linkage
nttcgcccttggtgttacacca

SEQ ID NO: 338 - RNA, 22 nt, Synthetic construct
  source 1..22: mol_type = other RNA
  misc_feature 1: note = GalNAc3
  misc_feature 2: note = invAb
  modified_base 2..7: mod_base = OTHER; note = 2'-O-methyl ribonucleotide
  modified_base 8..11: mod_base = OTHER; note = 2'-deoxy-2'-fluoro ribonucleotide
  modified_base 12..22: mod_base = OTHER; note = 2'-O-methyl ribonucleotide
  modified_base 1: mod_base = OTHER; note = phosphorothioate internucleotide linkage
  modified_base 20..21: mod_base = OTHER; note = phosphorothioate internucleotide linkage
  modified_base 21..22: mod_base = OTHER; note = phosphorothioate internucleotide linkage
ncgcccttggtgttacaccatt

SEQ ID NO: 339 - RNA, 19 nt, Synthetic construct
  source 1..19: mol_type = other RNA
  misc_feature 1: note = GalNAc3
  misc_feature 19: note = invAb
  modified_base 1..6: mod_base = OTHER; note = 2'-O-methyl ribonucleotide
  modified_base 7: mod_base = OTHER; note = 2'-deoxy-2'-fluoro ribonucleotide
  modified_base 8: mod_base = OTHER; note = 2'-O-methyl ribonucleotide
  modified_base 9..12: mod_base = OTHER; note = 2'-deoxy-2'-fluoro ribonucleotide
  modified_base 13..18: mod_base = OTHER; note = 2'-O-methyl ribonucleotide
  modified_base 1: mod_base = OTHER; note = phosphorothioate internucleotide linkage
  modified_base 18..19: mod_base = OTHER; note = phosphorothioate internucleotide linkage
cgcccttggtgttacaccn

SEQ ID NO: 340 - RNA, 20 nt, Synthetic construct
  source 1..20: mol_type = other RNA
  misc_feature 1: note = GalNAc3
  misc_feature 2: note = invAb
  modified_base 2..7: mod_base = OTHER; note = 2'-O-methyl ribonucleotide
  modified_base 8: mod_base = OTHER; note = 2'-deoxy-2'-fluoro ribonucleotide
  modified_base 9: mod_base = OTHER; note = 2'-O-methyl ribonucleotide
  modified_base 10..13: mod_base = OTHER; note = 2'-deoxy-2'-fluoro ribonucleotide
  modified_base 14..20: mod_base = OTHER; note = 2'-O-methyl ribonucleotide
  modified_base 1: mod_base = OTHER; note = phosphorothioate internucleotide linkage
  modified_base 18..19: mod_base = OTHER; note = phosphorothioate internucleotide linkage
  modified_base 19..20: mod_base = OTHER; note = phosphorothioate internucleotide linkage
ncgcccttggtgttacacca

SEQ ID NO: 341 - RNA, 20 nt, Synthetic construct
  source 1..20: mol_type = other RNA
  misc_feature 1: note = GalNAc3
  misc_feature 2: note = invAb
  modified_base 2..7: mod_base = OTHER; note = 2'-O-methyl ribonucleotide
  modified_base 8..11: mod_base = OTHER; note = 2'-deoxy-2'-fluoro ribonucleotide
  modified_base 12..20: mod_base = OTHER; note = 2'-O-methyl ribonucleotide
  modified_base 1: mod_base = OTHER; note = phosphorothioate internucleotide linkage
  modified_base 18..19: mod_base = OTHER; note = phosphorothioate internucleotide linkage
  modified_base 19..20: mod_base = OTHER; note = phosphorothioate internucleotide linkage
ncgcccttggtgttacacca

SEQ ID NO: 342 - RNA, 21 nt, Synthetic construct
  source 1..21: mol_type = other RNA
  misc_feature 1: note = GalNAc3
  misc_feature 21: note = invAb
  modified_base 1..6: mod_base = OTHER; note = 2'-O-methyl ribonucleotide
  modified_base 7: mod_base = OTHER; note = 2'-deoxy-2'-fluoro ribonucleotide
  modified_base 8: mod_base = OTHER; note = 2'-O-methyl ribonucleotide
  modified_base 9..12: mod_base = OTHER; note = 2'-deoxy-2'-fluoro ribonucleotide
  modified_base 13..20: mod_base = OTHER; note = 2'-O-methyl ribonucleotide
  modified_base 1: mod_base = OTHER; note = phosphorothioate internucleotide linkage
  modified_base 20..21: mod_base = OTHER; note = phosphorothioate internucleotide linkage
ttcgcccttggtgttacaccn

SEQ ID NO: 343 - RNA, 21 nt, Synthetic construct
  source 1..21: mol_type = other RNA
  misc_feature 1: note = GalNAc3
  modified_base 1..6: mod_base = OTHER; note = 2'-O-methyl ribonucleotide
  modified_base 7: mod_base = OTHER; note = 2'-deoxy-2'-fluoro ribonucleotide
  modified_base 8: mod_base = OTHER; note = 2'-O-methyl ribonucleotide
  modified_base 9..12: mod_base = OTHER; note = 2'-deoxy-2'-fluoro ribonucleotide
  modified_base 13..21: mod_base = OTHER; note = 2'-O-methyl ribonucleotide
  modified_base 19..20: mod_base = OTHER; note = phosphorothioate internucleotide linkage
  modified_base 20..21: mod_base = OTHER; note = phosphorothioate internucleotide linkage
gcccttggtgttacaccattt

SEQ ID NO: 344 - RNA, 21 nt, Synthetic construct
  source 1..21: mol_type = other RNA
  misc_feature 1: note = GalNAc3
  misc_feature 21: note = invAb
  modified_base 1..6: mod_base = OTHER; note = 2'-O-methyl ribonucleotide
  modified_base 7: mod_base = OTHER; note = 2'-deoxy-2'-fluoro ribonucleotide
  modified_base 8: mod_base = OTHER; note = 2'-O-methyl ribonucleotide
  modified_base 9..12: mod_base = OTHER; note = 2'-deoxy-2'-fluoro ribonucleotide
  modified_base 13..20: mod_base = OTHER; note = 2'-O-methyl ribonucleotide
  modified_base 1: mod_base = OTHER; note = phosphorothioate internucleotide linkage
  modified_base 20..21: mod_base = OTHER; note = phosphorothioate internucleotide linkage
tcgcccttggtgttacaccan

SEQ ID NO: 345 - RNA, 21 nt, Synthetic construct
  source 1..21: mol_type = other RNA
  misc_feature 1: note = GalNAc3
  misc_feature 21: note = invAb
  modified_base 1..8: mod_base = OTHER; note = 2'-O-methyl ribonucleotide
  modified_base 9: mod_base = OTHER; note = 2'-deoxy-2'-fluoro ribonucleotide
  modified_base 10: mod_base = OTHER; note = 2'-O-methyl ribonucleotide
  modified_base 11..14: mod_base = OTHER; note = 2'-deoxy-2'-fluoro ribonucleotide
  modified_base 15..20: mod_base = OTHER; note = 2'-O-methyl ribonucleotide
  modified_base 1: mod_base = OTHER; note = phosphorothioate internucleotide linkage
  modified_base 20..21: mod_base = OTHER; note = phosphorothioate internucleotide linkage
tcgcccttggtgttacaccan

SEQ ID NO: 346 - RNA, 21 nt, Synthetic construct
  source 1..21: mol_type = other RNA
  misc_feature 1: note = GalNAc3
  misc_feature 21: note = invAb
  modified_base 1..6: mod_base = OTHER; note = 2'-O-methyl ribonucleotide
  modified_base 7: mod_base = OTHER; note = 2'-deoxy-2'-fluoro ribonucleotide
  modified_base 8: mod_base = OTHER; note = 2'-O-methyl ribonucleotide
  modified_base 9..12: mod_base = OTHER; note = 2'-deoxy-2'-fluoro ribonucleotide
  modified_base 13..20: mod_base = OTHER; note = 2'-O-methyl ribonucleotide
  modified_base 1: mod_base = OTHER; note = phosphorothioate internucleotide linkage
  modified_base 20..21: mod_base = OTHER; note = phosphorothioate internucleotide linkage
gcccttggtgttacaccattn

SEQ ID NO: 347 - RNA, 21 nt, Synthetic construct
  source 1..21: mol_type = other RNA
  misc_feature 1: note = GalNAc3
  modified_base 1..6: mod_base = OTHER; note = 2'-O-methyl ribonucleotide
  modified_base 7: mod_base = OTHER; note = 2'-deoxy-2'-fluoro ribonucleotide
  modified_base 8: mod_base = OTHER; note = 2'-O-methyl ribonucleotide
  modified_base 9..12: mod_base = OTHER; note = 2'-deoxy-2'-fluoro ribonucleotide
  modified_base 13..21: mod_base = OTHER; note = 2'-O-methyl ribonucleotide
  modified_base 19..20: mod_base = OTHER; note = phosphorothioate internucleotide linkage
  modified_base 20..21: mod_base = OTHER; note = phosphorothioate internucleotide linkage
ggtgttacaccatggatcttt

SEQ ID NO: 348 - RNA, 21 nt, Synthetic construct
  source 1..21: mol_type = other RNA
  misc_feature 1: note = GalNAc3
  modified_base 1..6: mod_base = OTHER; note = 2'-O-methyl ribonucleotide
  modified_base 7: mod_base = OTHER; note = 2'-deoxy-2'-fluoro ribonucleotide
  modified_base 8: mod_base = OTHER; note = 2'-O-methyl ribonucleotide
  modified_base 9..12: mod_base = OTHER; note = 2'-deoxy-2'-fluoro ribonucleotide
  modified_base 13..21: mod_base = OTHER; note = 2'-O-methyl ribonucleotide
  modified_base 19..20: mod_base = OTHER; note = phosphorothioate internucleotide linkage
  modified_base 20..21: mod_base = OTHER; note = phosphorothioate internucleotide linkage
gaatcaagtgtccttgcaatt

SEQ ID NO: 349 - RNA, 21 nt, Synthetic construct
  source 1..21: mol_type = other RNA
  misc_feature 1: note = GalNAc3
  misc_feature 21: note = invAb
  modified_base 1..6: mod_base = OTHER; note = 2'-O-methyl ribonucleotide
  modified_base 7: mod_base = OTHER; note = 2'-deoxy-2'-fluoro ribonucleotide
  modified_base 8: mod_base = OTHER; note = 2'-O-methyl ribonucleotide
  modified_base 9..12: mod_base = OTHER; note = 2'-deoxy-2'-fluoro ribonucleotide
  modified_base 13..20: mod_base = OTHER; note = 2'-O-methyl ribonucleotide
  modified_base 1: mod_base = OTHER; note = phosphorothioate internucleotide linkage
  modified_base 20..21: mod_base = OTHER; note = phosphorothioate internucleotide linkage
cagaatcaagtgtccttgcan

SEQ ID NO: 350 - RNA, 21 nt, Synthetic construct
  source 1..21: mol_type = other RNA
  misc_feature 1: note = GalNAc3
  misc_feature 21: note = invAb
  modified_base 1..6: mod_base = OTHER; note = 2'-O-methyl ribonucleotide
  modified_base 7: mod_base = OTHER; note = 2'-deoxy-2'-fluoro ribonucleotide
  modified_base 8: mod_base = OTHER; note = 2'-O-methyl ribonucleotide
  modified_base 9..12: mod_base = OTHER; note = 2'-deoxy-2'-fluoro ribonucleotide
  modified_base 13..20: mod_base = OTHER; note = 2'-O-methyl ribonucleotide
  modified_base 1: mod_base = OTHER; note = phosphorothioate internucleotide linkage
  modified_base 20..21: mod_base = OTHER; note = phosphorothioate internucleotide linkage
gaatcaagtgtccttgcaatn

SEQ ID NO: 351 - RNA, 21 nt, Synthetic construct
  source 1..21: mol_type = other RNA
  misc_feature 1: note = GalNAc3
  misc_feature 21: note = invAb
  modified_base 1..8: mod_base = OTHER; note = 2'-O-methyl ribonucleotide
  modified_base 9: mod_base = OTHER; note = 2'-deoxy-2'-fluoro ribonucleotide
  modified_base 10: mod_base = OTHER; note = 2'-O-methyl ribonucleotide
  modified_base 11..14: mod_base = OTHER; note = 2'-deoxy-2'-fluoro ribonucleotide
  modified_base 15..20: mod_base = OTHER; note = 2'-O-methyl ribonucleotide
  modified_base 1: mod_base = OTHER; note = phosphorothioate internucleotide linkage
  modified_base 20..21: mod_base = OTHER; note = phosphorothioate internucleotide linkage
cagaatcaagtgtccttgcan

SEQ ID NO: 352 - RNA, 22 nt, Synthetic construct
  source 1..22: mol_type = other RNA
  misc_feature 1: note = GalNAc3
  misc_feature 2: note = invAb
  modified_base 2..7: mod_base = OTHER; note = 2'-O-methyl ribonucleotide
  modified_base 8..11: mod_base = OTHER; note = 2'-deoxy-2'-fluoro ribonucleotide
  modified_base 12..22: mod_base = OTHER; note = 2'-O-methyl ribonucleotide
  modified_base 1: mod_base = OTHER; note = phosphorothioate internucleotide linkage
  modified_base 20..21: mod_base = OTHER; note = phosphorothioate internucleotide linkage
  modified_base 21..22: mod_base = OTHER; note = phosphorothioate internucleotide linkage
ngaatcaagtgtccttgcaatt

SEQ ID NO: 353 - RNA, 19 nt, Synthetic construct
  source 1..19: mol_type = other RNA
  misc_feature 1: note = GalNAc3
  misc_feature 19: note = invAb
  modified_base 1..6: mod_base = OTHER; note = 2'-O-methyl ribonucleotide
  modified_base 7: mod_base = OTHER; note = 2'-deoxy-2'-fluoro ribonucleotide
  modified_base 8: mod_base = OTHER; note = 2'-O-methyl ribonucleotide
  modified_base 9..12: mod_base = OTHER; note = 2'-deoxy-2'-fluoro ribonucleotide
  modified_base 13..18: mod_base = OTHER; note = 2'-O-methyl ribonucleotide
  modified_base 1: mod_base = OTHER; note = phosphorothioate internucleotide linkage
  modified_base 18..19: mod_base = OTHER; note = phosphorothioate internucleotide linkage
gaatcaagtgtccttgcan

SEQ ID NO: 354 - RNA, 19 nt, Synthetic construct
  source 1..19: mol_type = other RNA
  misc_feature 1: note = GalNAc3
  misc_feature 19: note = invAb
  modified_base 1..6: mod_base = OTHER; note = 2'-O-methyl ribonucleotide
  modified_base 7: mod_base = OTHER; note = 2'-deoxy-2'-fluoro ribonucleotide
  modified_base 8: mod_base = OTHER; note = 2'-O-methyl ribonucleotide
  modified_base 9: mod_base = OTHER; note = 2'-deoxy-2'-fluoro ribonucleotide
  modified_base 10: mod_base = OTHER; note = 2'-O-methyl ribonucleotide
  modified_base 11..12: mod_base = OTHER; note = 2'-deoxy-2'-fluoro ribonucleotide
  modified_base 13..18: mod_base = OTHER; note = 2'-O-methyl ribonucleotide
  modified_base 1: mod_base = OTHER; note = phosphorothioate internucleotide linkage
  modified_base 18..19: mod_base = OTHER; note = phosphorothioate internucleotide linkage
gaatcaagtgtccttgcan

SEQ ID NO: 355 - RNA, 19 nt, Synthetic construct
  source 1..19: mol_type = other RNA
  misc_feature 1: note = GalNAc3
  misc_feature 19: note = invAb
  modified_base 1..6: mod_base = OTHER; note = 2'-O-methyl ribonucleotide
  modified_base 7..10: mod_base = OTHER; note = 2'-deoxy-2'-fluoro ribonucleotide
  modified_base 11..18: mod_base = OTHER; note = 2'-O-methyl ribonucleotide
  modified_base 1: mod_base = OTHER; note = phosphorothioate internucleotide linkage
  modified_base 18..19: mod_base = OTHER; note = phosphorothioate internucleotide linkage
gaatcaagtgtccttgcan

SEQ ID NO: 356 - RNA, 21 nt, Synthetic construct
  source 1..21: mol_type = other RNA
  misc_feature 1: note = GalNAc3
  misc_feature 21: note = invAb
  modified_base 1..10: mod_base = OTHER; note = 2'-O-methyl ribonucleotide
  modified_base 11..14: mod_base = OTHER; note = 2'-deoxy-2'-fluoro ribonucleotide
  modified_base 15..20: mod_base = OTHER; note = 2'-O-methyl ribonucleotide
  modified_base 1: mod_base = OTHER; note = phosphorothioate internucleotide linkage
  modified_base 20..21: mod_base = OTHER; note = phosphorothioate internucleotide linkage
cagaatcaagtgtccttgcan

SEQ ID NO: 357 - RNA, 21 nt, Synthetic construct
  source 1..21: mol_type = other RNA
  misc_feature 1: note = GalNAc3
  misc_feature 21: note = invAb
  modified_base 1..8: mod_base = OTHER; note = 2'-O-methyl ribonucleotide
  modified_base 9..12: mod_base = OTHER; note = 2'-deoxy-2'-fluoro ribonucleotide
  modified_base 13..20: mod_base = OTHER; note = 2'-O-methyl ribonucleotide
  modified_base 1: mod_base = OTHER; note = phosphorothioate internucleotide linkage
  modified_base 20..21: mod_base = OTHER; note = phosphorothioate internucleotide linkage
cagaatcaagtgtccttgcan

SEQ ID NO: 358 - RNA, 21 nt, Synthetic construct
  source 1..21: mol_type = other RNA
  misc_feature 1: note = GalNAc3
  modified_base 1..6: mod_base = OTHER; note = 2'-O-methyl ribonucleotide
  modified_base 7: mod_base = OTHER; note = 2'-deoxy-2'-fluoro ribonucleotide
  modified_base 8: mod_base = OTHER; note = 2'-O-methyl ribonucleotide
  modified_base 9..12: mod_base = OTHER; note = 2'-deoxy-2'-fluoro ribonucleotide
  modified_base 13..21: mod_base = OTHER; note = 2'-O-methyl ribonucleotide
  modified_base 19..20: mod_base = OTHER; note = phosphorothioate internucleotide linkage
  modified_base 20..21: mod_base = OTHER; note = phosphorothioate internucleotide linkage
aatcaagtgtccttgcaactt

SEQ ID NO: 359 - RNA, 21 nt, Synthetic construct
  source 1..21: mol_type = other RNA
  misc_feature 1: note = GalNAc3
  modified_base 1..6: mod_base = OTHER; note = 2'-O-methyl ribonucleotide
  modified_base 7: mod_base = OTHER; note = 2'-deoxy-2'-fluoro ribonucleotide
  modified_base 8: mod_base = OTHER; note = 2'-O-methyl ribonucleotide
  modified_base 9..12: mod_base = OTHER; note = 2'-deoxy-2'-fluoro ribonucleotide
  modified_base 13..21: mod_base = OTHER; note = 2'-O-methyl ribonucleotide
  modified_base 19..20: mod_base = OTHER; note = phosphorothioate internucleotide linkage
  modified_base 20..21: mod_base = OTHER; note = phosphorothioate internucleotide linkage
aatcaagtgtccttgcaattt

SEQ ID NO: 360 - RNA, 22 nt, Synthetic construct
  source 1..22: mol_type = other RNA
  misc_feature 1: note = GalNAc3
  misc_feature 2: note = invAb
  misc_feature 22: note = invAb
  modified_base 2..9: mod_base = OTHER; note = 2'-O-methyl ribonucleotide
  modified_base 10: mod_base = OTHER; note = 2'-deoxy-2'-fluoro ribonucleotide
  modified_base 11: mod_base = OTHER; note = 2'-O-methyl ribonucleotide
  modified_base 12..15: mod_base = OTHER; note = 2'-deoxy-2'-fluoro ribonucleotide
  modified_base 16..21: mod_base = OTHER; note = 2'-O-methyl ribonucleotide
  modified_base 1: mod_base = OTHER; note = phosphorothioate internucleotide linkage
  modified_base 21..22: mod_base = OTHER; note = phosphorothioate internucleotide linkage
nagaatcaagtgtccttgcaan

SEQ ID NO: 361 - RNA, 22 nt, Synthetic construct
  source 1..22: mol_type = other RNA
  misc_feature 1: note = GalNAc3
  misc_feature 2: note = invAb
  modified_base 2..9: mod_base = OTHER; note = 2'-O-methyl ribonucleotide
  modified_base 10: mod_base = OTHER; note = 2'-deoxy-2'-fluoro ribonucleotide
  modified_base 11: mod_base = OTHER; note = 2'-O-methyl ribonucleotide
  modified_base 12..15: mod_base = OTHER; note = 2'-deoxy-2'-fluoro ribonucleotide
  modified_base 16..22: mod_base = OTHER; note = 2'-O-methyl ribonucleotide
  modified_base 1: mod_base = OTHER; note = phosphorothioate internucleotide linkage
  modified_base 20..21: mod_base = OTHER; note = phosphorothioate internucleotide linkage
  modified_base 21..22: mod_base = OTHER; note = phosphorothioate internucleotide linkage
nagaatcaagtgtccttgcaat

SEQ ID NO: 362 - RNA, 21 nt, Synthetic construct
  source 1..21: mol_type = other RNA
  misc_feature 1: note = GalNAc3
  misc_feature 21: note = invAb
  modified_base 1..6: mod_base = OTHER; note = 2'-O-methyl ribonucleotide
  modified_base 7: mod_base = OTHER; note = 2'-deoxy-2'-fluoro ribonucleotide
  modified_base 8: mod_base = OTHER; note = 2'-O-methyl ribonucleotide
  modified_base 9..12: mod_base = OTHER; note = 2'-deoxy-2'-fluoro ribonucleotide
  modified_base 13..20: mod_base = OTHER; note = 2'-O-methyl ribonucleotide
  modified_base 1: mod_base = OTHER; note = phosphorothioate internucleotide linkage
  modified_base 20..21: mod_base = OTHER; note = phosphorothioate internucleotide linkage
aatcaagtgtccttgcaattn

SEQ ID NO: 363 - RNA, 22 nt, Synthetic construct
  source 1..22: mol_type = other RNA
  misc_feature 1: note = GalNAc3
  misc_feature 2: note = invAb
  modified_base 2..7: mod_base = OTHER; note = 2'-O-methyl ribonucleotide
  modified_base 8..11: mod_base = OTHER; note = 2'-deoxy-2'-fluoro ribonucleotide
  modified_base 12..22: mod_base = OTHER; note = 2'-O-methyl ribonucleotide
  modified_base 1: mod_base = OTHER; note = phosphorothioate internucleotide linkage
  modified_base 20..21: mod_base = OTHER; note = phosphorothioate internucleotide linkage
  modified_base 21..22: mod_base = OTHER; note = phosphorothioate internucleotide linkage
naatcaagtgtccttgcaattt

SEQ ID NO: 364 - RNA, 19 nt, Synthetic construct
  source 1..19: mol_type = other RNA
  misc_feature 1: note = GalNAc3
  misc_feature 19: note = invAb
  modified_base 1..6: mod_base = OTHER; note = 2'-O-methyl ribonucleotide
  modified_base 7: mod_base = OTHER; note = 2'-deoxy-2'-fluoro ribonucleotide
  modified_base 8: mod_base = OTHER; note = 2'-O-methyl ribonucleotide
  modified_base 9: mod_base = OTHER; note = 2'-deoxy-2'-fluoro ribonucleotide
  modified_base 10: mod_base = OTHER; note = 2'-O-methyl ribonucleotide
  modified_base 11..12: mod_base = OTHER; note = 2'-deoxy-2'-fluoro ribonucleotide
  modified_base 13..18: mod_base = OTHER; note = 2'-O-methyl ribonucleotide
  modified_base 1: mod_base = OTHER; note = phosphorothioate internucleotide linkage
  modified_base 18..19: mod_base = OTHER; note = phosphorothioate internucleotide linkage
aatcaagtgtccttgcaan

SEQ ID NO: 365 - RNA, 21 nt, Synthetic construct
  source 1..21: mol_type = other RNA
  misc_feature 1: note = GalNAc3
  misc_feature 21: note = invAb
  modified_base 1..6: mod_base = OTHER; note = 2'-O-methyl ribonucleotide
  modified_base 7: mod_base = OTHER; note = 2'-deoxy-2'-fluoro ribonucleotide
  modified_base 8: mod_base = OTHER; note = 2'-O-methyl ribonucleotide
  modified_base 9: mod_base = OTHER; note = 2'-deoxy-2'-fluoro ribonucleotide
  modified_base 10: mod_base = OTHER; note = 2'-O-methyl ribonucleotide
  modified_base 11..12: mod_base = OTHER; note = 2'-deoxy-2'-fluoro ribonucleotide
  modified_base 13..20: mod_base = OTHER; note = 2'-O-methyl ribonucleotide
  modified_base 1: mod_base = OTHER; note = phosphorothioate internucleotide linkage
  modified_base 20..21: mod_base = OTHER; note = phosphorothioate internucleotide linkage
agaatcaagtgtccttgcaan

SEQ ID NO: 366 - RNA, 21 nt, Synthetic construct
  source 1..21: mol_type = other RNA
  misc_feature 1: note = GalNAc3
  misc_feature 21: note = invAb
  modified_base 1..6: mod_base = OTHER; note = 2'-O-methyl ribonucleotide
  modified_base 7: mod_base = OTHER; note = 2'-deoxy-2'-fluoro ribonucleotide
  modified_base 8: mod_base = OTHER; note = 2'-O-methyl ribonucleotide
  modified_base 9: mod_base = OTHER; note = 2'-deoxy-2'-fluoro ribonucleotide
  modified_base 10: mod_base = OTHER; note = 2'-O-methyl ribonucleotide
  modified_base 11..12: mod_base = OTHER; note = 2'-deoxy-2'-fluoro ribonucleotide
  modified_base 13..20: mod_base = OTHER; note = 2'-O-methyl ribonucleotide
  modified_base 1: mod_base = OTHER; note = phosphorothioate internucleotide linkage
  modified_base 20..21: mod_base = OTHER; note = phosphorothioate internucleotide linkage
aatcaagtgtccttgcaattn

SEQ ID NO: 367 - RNA, 19 nt, Synthetic construct
  source 1..19: mol_type = other RNA
  misc_feature 1: note = GalNAc3
  misc_feature 19: note = invAb
  modified_base 1..6: mod_base = OTHER; note = 2'-O-methyl ribonucleotide
  modified_base 7: mod_base = OTHER; note = 2'-deoxy-2'-fluoro ribonucleotide
  modified_base 8: mod_base = OTHER; note = 2'-O-methyl ribonucleotide
  modified_base 9..10: mod_base = OTHER; note = 2'-deoxy-2'-fluoro ribonucleotide
  modified_base 11..18: mod_base = OTHER; note = 2'-O-methyl ribonucleotide
  modified_base 1: mod_base = OTHER; note = phosphorothioate internucleotide linkage
  modified_base 18..19: mod_base = OTHER; note = phosphorothioate internucleotide linkage
aatcaagtgtccttgcaan

SEQ ID NO: 368 - RNA, 21 nt, Synthetic construct
  source 1..21: mol_type = other RNA
  misc_feature 1: note = GalNAc3
  misc_feature 21: note = invAb
  modified_base 1..6: mod_base = OTHER; note = 2'-O-methyl ribonucleotide
  modified_base 7..10: mod_base = OTHER; note = 2'-deoxy-2'-fluoro ribonucleotide
  modified_base 11..20: mod_base = OTHER; note = 2'-O-methyl ribonucleotide
  modified_base 1: mod_base = OTHER; note = phosphorothioate internucleotide linkage
  modified_base 20..21: mod_base = OTHER; note = phosphorothioate internucleotide linkage
aatcaagtgtccttgcaattn

SEQ ID NO: 369 - RNA, 19 nt, Synthetic construct
  source 1..19: mol_type = other RNA
  misc_feature 1: note = GalNAc3
  misc_feature 19: note = invAb
  modified_base 1..6: mod_base = OTHER; note = 2'-O-methyl ribonucleotide
  modified_base 7..10: mod_base = OTHER; note = 2'-deoxy-2'-fluoro ribonucleotide
  modified_base 11..18: mod_base = OTHER; note = 2'-O-methyl ribonucleotide
  modified_base 1: mod_base = OTHER; note = phosphorothioate internucleotide linkage
  modified_base 18..19: mod_base = OTHER; note = phosphorothioate internucleotide linkage
aatcaagtgtccttgcaan

SEQ ID NO: 370 - RNA, 21 nt, Synthetic construct
  source 1..21: mol_type = other RNA
  misc_feature 1: note = GalNAc3
  misc_feature 21: note = invAb
  modified_base 1..8: mod_base = OTHER; note = 2'-O-methyl ribonucleotide
  modified_base 9: mod_base = OTHER; note = 2'-deoxy-2'-fluoro ribonucleotide
  modified_base 10: mod_base = OTHER; note = 2'-O-methyl ribonucleotide
  modified_base 11..14: mod_base = OTHER; note = 2'-deoxy-2'-fluoro ribonucleotide
  modified_base 15..20: mod_base = OTHER; note = 2'-O-methyl ribonucleotide
  modified_base 1: mod_base = OTHER; note = phosphorothioate internucleotide linkage
  modified_base 20..21: mod_base = OTHER; note = phosphorothioate internucleotide linkage
agaatcaagtgtccttgcaan

SEQ ID NO: 371 - RNA, 21 nt, Synthetic construct
  source 1..21: mol_type = other RNA
  misc_feature 1: note = GalNAc3
  misc_feature 21: note = invAb
  modified_base 1..10: mod_base = OTHER; note = 2'-O-methyl ribonucleotide
  modified_base 11..14: mod_base = OTHER; note = 2'-deoxy-2'-fluoro ribonucleotide
  modified_base 15..20: mod_base = OTHER; note = 2'-O-methyl ribonucleotide
  modified_base 1: mod_base = OTHER; note = phosphorothioate internucleotide linkage
  modified_base 20..21: mod_base = OTHER; note = phosphorothioate internucleotide linkage
agaatcaagtgtccttgcaan

SEQ ID NO: 372 - RNA, 21 nt, Synthetic construct
  source 1..21: mol_type = other RNA
  misc_feature 1: note = GalNAc3
  misc_feature 21: note = invAb
  modified_base 1..8: mod_base = OTHER; note = 2'-O-methyl ribonucleotide
  modified_base 9..12: mod_base = OTHER; note = 2'-deoxy-2'-fluoro ribonucleotide
  modified_base 13..20: mod_base = OTHER; note = 2'-O-methyl ribonucleotide
  modified_base 1: mod_base = OTHER; note = phosphorothioate internucleotide linkage
  modified_base 20..21: mod_base = OTHER; note = phosphorothioate internucleotide linkage
agaatcaagtgtccttgcaan

SEQ ID NO: 373 - RNA, 21 nt, Synthetic construct
  source 1..21: mol_type = other RNA
  misc_feature 1: note = GalNAc3
  modified_base 1..6: mod_base = OTHER; note = 2'-O-methyl ribonucleotide
  modified_base 7: mod_base = OTHER; note = 2'-deoxy-2'-fluoro ribonucleotide
  modified_base 8: mod_base = OTHER; note = 2'-O-methyl ribonucleotide
  modified_base 9..12: mod_base = OTHER; note = 2'-deoxy-2'-fluoro ribonucleotide
  modified_base 13..21: mod_base = OTHER; note = 2'-O-methyl ribonucleotide
  modified_base 19..20: mod_base = OTHER; note = phosphorothioate internucleotide linkage
  modified_base 20..21: mod_base = OTHER; note = phosphorothioate internucleotide linkage
tcaagtgtccttgcaactttt

SEQ ID NO: 374 - RNA, 21 nt, Synthetic construct
  source 1..21: mol_type = other RNA
  misc_feature 1: note = GalNAc3
  modified_base 1..6: mod_base = OTHER; note = 2'-O-methyl ribonucleotide
  modified_base 7: mod_base = OTHER; note = 2'-deoxy-2'-fluoro ribonucleotide
  modified_base 8: mod_base = OTHER; note = 2'-O-methyl ribonucleotide
  modified_base 9..12: mod_base = OTHER; note = 2'-deoxy-2'-fluoro ribonucleotide
  modified_base 13..21: mod_base = OTHER; note = 2'-O-methyl ribonucleotide
  modified_base 19..20: mod_base = OTHER; note = phosphorothioate internucleotide linkage
  modified_base 20..21: mod_base = OTHER; note = phosphorothioate internucleotide linkage
cttctgaagaagcaccaattt

SEQ ID NO: 375 - RNA, 21 nt, Synthetic construct
  source 1..21: mol_type = other RNA
  misc_feature 1: note = GalNAc3
  modified_base 1..6: mod_base = OTHER; note = 2'-O-methyl ribonucleotide
  modified_base 7: mod_base = OTHER; note = 2'-deoxy-2'-fluoro ribonucleotide
  modified_base 8: mod_base = OTHER; note = 2'-O-methyl ribonucleotide
  modified_base 9..12: mod_base = OTHER; note = 2'-deoxy-2'-fluoro ribonucleotide
  modified_base 13..21: mod_base = OTHER; note = 2'-O-methyl ribonucleotide
  modified_base 19..20: mod_base = OTHER; note = phosphorothioate internucleotide linkage
  modified_base 20..21: mod_base = OTHER; note = phosphorothioate internucleotide linkage
ttctgaagaagcaccaacatt

SEQ ID NO: 376 - RNA, 21 nt, Synthetic construct
  source 1..21: mol_type = other RNA
  misc_feature 1: note = GalNAc3
  modified_base 1..6: mod_base = OTHER; note = 2'-O-methyl ribonucleotide
  modified_base 7: mod_base = OTHER; note = 2'-deoxy-2'-fluoro ribonucleotide
  modified_base 8: mod_base = OTHER; note = 2'-O-methyl ribonucleotide
  modified_base 9..12: mod_base = OTHER; note = 2'-deoxy-2'-fluoro ribonucleotide
  modified_base 13..21: mod_base = OTHER; note = 2'-O-methyl ribonucleotide
  modified_base 19..20: mod_base = OTHER; note = phosphorothioate internucleotide linkage
  modified_base 20..21: mod_base = OTHER; note = phosphorothioate internucleotide linkage
tcttggtcctctatgacattt

SEQ ID NO: 377 - RNA, 21 nt, Synthetic construct
  source 1..21: mol_type = other RNA
  misc_feature 1: note = GalNAc3
  misc_feature 21: note = invAb
  modified_base 1..6: mod_base = OTHER; note = 2'-O-methyl ribonucleotide
  modified_base 7: mod_base = OTHER; note = 2'-deoxy-2'-fluoro ribonucleotide
  modified_base 8: mod_base = OTHER; note = 2'-O-methyl ribonucleotide
  modified_base 9..12: mod_base = OTHER; note = 2'-deoxy-2'-fluoro ribonucleotide
  modified_base 13..20: mod_base = OTHER; note = 2'-O-methyl ribonucleotide
  modified_base 1: mod_base = OTHER; note = phosphorothioate internucleotide linkage
  modified_base 20..21: mod_base = OTHER; note = phosphorothioate internucleotide linkage
agtcttggtcctctatgacan

SEQ ID NO: 378 - RNA, 21 nt, Synthetic construct
  source 1..21: mol_type = other RNA
  misc_feature 1: note = GalNAc3
  misc_feature 21: note = invAb
  modified_base 1..8: mod_base = OTHER; note = 2'-O-methyl ribonucleotide
  modified_base 9: mod_base = OTHER; note = 2'-deoxy-2'-fluoro ribonucleotide
  modified_base 10: mod_base = OTHER; note = 2'-O-methyl ribonucleotide
  modified_base 11..14: mod_base = OTHER; note = 2'-deoxy-2'-fluoro ribonucleotide
  modified_base 15..20: mod_base = OTHER; note = 2'-O-methyl ribonucleotide
  modified_base 1: mod_base = OTHER; note = phosphorothioate internucleotide linkage
  modified_base 20..21: mod_base = OTHER; note = phosphorothioate internucleotide linkage
agtcttggtcctctatgacan

SEQ ID NO: 379 - RNA, 22 nt, Synthetic construct
  source 1..22: mol_type = other RNA
  misc_feature 1: note = GalNAc3
  misc_feature 2: note = invAb
  modified_base 2..7: mod_base = OTHER; note = 2'-O-methyl ribonucleotide
  modified_base 8..11: mod_base = OTHER; note = 2'-deoxy-2'-fluoro ribonucleotide
  modified_base 12..22: mod_base = OTHER; note = 2'-O-methyl ribonucleotide
  modified_base 1: mod_base = OTHER; note = phosphorothioate internucleotide linkage
  modified_base 20..21: mod_base = OTHER; note = phosphorothioate internucleotide linkage
  modified_base 21..22: mod_base = OTHER; note = phosphorothioate internucleotide linkage
ntcttggtcctctatgacattt

SEQ ID NO: 380 - RNA, 21 nt, Synthetic construct
  source 1..21: mol_type = other RNA
  misc_feature 1: note = GalNAc3
  misc_feature 21: note = invAb
  modified_base 1..6: mod_base = OTHER; note = 2'-O-methyl ribonucleotide
  modified_base 7: mod_base = OTHER; note = 2'-deoxy-2'-fluoro ribonucleotide
  modified_base 8: mod_base = OTHER; note = 2'-O-methyl ribonucleotide
  modified_base 9..12: mod_base = OTHER; note = 2'-deoxy-2'-fluoro ribonucleotide
  modified_base 13..20: mod_base = OTHER; note = 2'-O-methyl ribonucleotide
  modified_base 1: mod_base = OTHER; note = phosphorothioate internucleotide linkage
  modified_base 20..21: mod_base = OTHER; note = phosphorothioate internucleotide linkage
tcttggtcctctatgacattn

SEQ ID NO: 381 - RNA, 20 nt, Synthetic construct
  source 1..20: mol_type = other RNA
  misc_feature 1: note = GalNAc3
  misc_feature 2: note = invAb
  modified_base 2..7: mod_base = OTHER; note = 2'-O-methyl ribonucleotide
  modified_base 8: mod_base = OTHER; note = 2'-deoxy-2'-fluoro ribonucleotide
  modified_base 9: mod_base = OTHER; note = 2'-O-methyl ribonucleotide
  modified_base 10..13: mod_base = OTHER; note = 2'-deoxy-2'-fluoro ribonucleotide
  modified_base 14..20: mod_base = OTHER; note = 2'-O-methyl ribonucleotide
  modified_base 1: mod_base = OTHER; note = phosphorothioate internucleotide linkage
  modified_base 18..19: mod_base = OTHER; note = phosphorothioate internucleotide linkage
  modified_base 19..20: mod_base = OTHER; note = phosphorothioate internucleotide linkage
ntcttggtcctctatgacat

SEQ ID NO: 382 - RNA, 19 nt, Synthetic construct
  source 1..19: mol_type = other RNA
  misc_feature 1: note = GalNAc3
  misc_feature 19: note = invAb
  modified_base 1..6: mod_base = OTHER; note = 2'-O-methyl ribonucleotide
  modified_base 7: mod_base = OTHER; note = 2'-deoxy-2'-fluoro ribonucleotide
  modified_base 8: mod_base = OTHER; note = 2'-O-methyl ribonucleotide
  modified_base 9..12: mod_base = OTHER; note = 2'-deoxy-2'-fluoro ribonucleotide
  modified_base 13..18: mod_base = OTHER; note = 2'-O-methyl ribonucleotide
  modified_base 1: mod_base = OTHER; note = phosphorothioate internucleotide linkage
  modified_base 18..19: mod_base = OTHER; note = phosphorothioate internucleotide linkage
tcttggtcctctatgacan

SEQ ID NO: 383 - RNA, 20 nt, Synthetic construct
  source 1..20: mol_type = other RNA
  misc_feature 1: note = GalNAc3
  misc_feature 2: note = invAb
  modified_base 2..7: mod_base = OTHER; note = 2'-O-methyl ribonucleotide
  modified_base 8..11: mod_base = OTHER; note = 2'-deoxy-2'-fluoro ribonucleotide
  modified_base 12..20: mod_base = OTHER; note = 2'-O-methyl ribonucleotide
  modified_base 1: mod_base = OTHER; note = phosphorothioate internucleotide linkage
  modified_base 18..19: mod_base = OTHER; note = phosphorothioate internucleotide linkage
  modified_base 19..20: mod_base = OTHER; note = phosphorothioate internucleotide linkage
ntcttggtcctctatgacat

SEQ ID NO: 384 - RNA, 21 nt, Synthetic construct
  source 1..21: mol_type = other RNA
  misc_feature 1: note = GalNAc3
  modified_base 1..6: mod_base = OTHER; note = 2'-O-methyl ribonucleotide
  modified_base 7: mod_base = OTHER; note = 2'-deoxy-2'-fluoro ribonucleotide
  modified_base 8: mod_base = OTHER; note = 2'-O-methyl ribonucleotide
  modified_base 9..12: mod_base = OTHER; note = 2'-deoxy-2'-fluoro ribonucleotide
  modified_base 13..21: mod_base = OTHER; note = 2'-O-methyl ribonucleotide
  modified_base 19..20: mod_base = OTHER; note = phosphorothioate internucleotide linkage
  modified_base 20..21: mod_base = OTHER; note = phosphorothioate internucleotide linkage
tgacaccacactggcatcatt

SEQ ID NO: 385 - RNA, 21 nt, Synthetic construct
  source 1..21: mol_type = other RNA
  misc_feature 1: note = GalNAc3
  misc_feature 21: note = invAb
  modified_base 1..6: mod_base = OTHER; note = 2'-O-methyl ribonucleotide
  modified_base 7: mod_base = OTHER; note = 2'-deoxy-2'-fluoro ribonucleotide
  modified_base 8: mod_base = OTHER; note = 2'-O-methyl ribonucleotide
  modified_base 9..12: mod_base = OTHER; note = 2'-deoxy-2'-fluoro ribonucleotide
  modified_base 13..20: mod_base = OTHER; note = 2'-O-methyl ribonucleotide
  modified_base 1: mod_base = OTHER; note = phosphorothioate internucleotide linkage
  modified_base 20..21: mod_base = OTHER; note = phosphorothioate internucleotide linkage
gacaacagaatattatccatn

SEQ ID NO: 386 - RNA, 21 nt, Synthetic construct
  source 1..21: mol_type = other RNA
  misc_feature 1: note = GalNAc3
  modified_base 1..6: mod_base = OTHER; note = 2'-O-methyl ribonucleotide
  modified_base 7: mod_base = OTHER; note = 2'-deoxy-2'-fluoro ribonucleotide
  modified_base 8: mod_base = OTHER; note = 2'-O-methyl ribonucleotide
  modified_base 9..12: mod_base = OTHER; note = 2'-deoxy-2'-fluoro ribonucleotide
  modified_base 13..21: mod_base = OTHER; note = 2'-O-methyl ribonucleotide
  modified_base 19..20: mod_base = OTHER; note = phosphorothioate internucleotide linkage
  modified_base 20..21: mod_base = OTHER; note = phosphorothioate internucleotide linkage
gcaacctgacacaatgtcttt

SEQ ID NO: 387 - RNA, 21 nt, Synthetic construct
  source 1..21: mol_type = other RNA
  misc_feature 1: note = GalNAc3
  modified_base 1..6: mod_base = OTHER; note = 2'-O-methyl ribonucleotide
  modified_base 7: mod_base = OTHER; note = 2'-deoxy-2'-fluoro ribonucleotide
  modified_base 8: mod_base = OTHER; note = 2'-O-methyl ribonucleotide
  modified_base 9..12: mod_base = OTHER; note = 2'-deoxy-2'-fluoro ribonucleotide
  modified_base 13..21: mod_base = OTHER; note = 2'-O-methyl ribonucleotide
  modified_base 19..20: mod_base = OTHER; note = phosphorothioate internucleotide linkage
  modified_base 20..21: mod_base = OTHER; note = phosphorothioate internucleotide linkage
acacaatgtccagtgacagtt

SEQ ID NO: 388 - RNA, 21 nt, Synthetic construct
  source 1..21: mol_type = other RNA
  misc_feature 1: note = GalNAc3
  modified_base 1..6: mod_base = OTHER; note = 2'-O-methyl ribonucleotide
  modified_base 7: mod_base = OTHER; note = 2'-deoxy-2'-fluoro ribonucleotide
  modified_base 8: mod_base = OTHER; note = 2'-O-methyl ribonucleotide
  modified_base 9..12: mod_base = OTHER; note = 2'-deoxy-2'-fluoro ribonucleotide
  modified_base 13..21: mod_base = OTHER; note = 2'-O-methyl ribonucleotide
  modified_base 19..20: mod_base = OTHER; note = phosphorothioate internucleotide linkage
  modified_base 20..21: mod_base = OTHER; note = phosphorothioate internucleotide linkage
acacaatgtccagtgacaatt

SEQ ID NO: 389 - RNA, 21 nt, Synthetic construct
  source 1..21: mol_type = other RNA
  misc_feature 1: note = GalNAc3
  modified_base 1..6: mod_base = OTHER; note = 2'-O-methyl ribonucleotide
  modified_base 7: mod_base = OTHER; note = 2'-deoxy-2'-fluoro ribonucleotide
  modified_base 8: mod_base = OTHER; note = 2'-O-methyl ribonucleotide
  modified_base 9..12: mod_base = OTHER; note = 2'-deoxy-2'-fluoro ribonucleotide
  modified_base 13..21: mod_base = OTHER; note = 2'-O-methyl ribonucleotide
  modified_base 19..20: mod_base = OTHER; note = phosphorothioate internucleotide linkage
  modified_base 20..21: mod_base = OTHER; note = phosphorothioate internucleotide linkage
atgtccagtgacagaatcatt

SEQ ID NO: 390 - RNA, 21 nt, Synthetic construct
  source 1..21: mol_type = other RNA
  misc_feature 1: note = GalNAc3
  modified_base 1..6: mod_base = OTHER; note = 2'-O-methyl ribonucleotide
  modified_base 7: mod_base = OTHER; note = 2'-deoxy-2'-fluoro ribonucleotide
  modified_base 8: mod_base = OTHER; note = 2'-O-methyl ribonucleotide
  modified_base 9..12: mod_base = OTHER; note = 2'-deoxy-2'-fluoro ribonucleotide
  modified_base 13..21: mod_base = OTHER; note = 2'-O-methyl ribonucleotide
  modified_base 19..20: mod_base = OTHER; note = phosphorothioate internucleotide linkage
  modified_base 20..21: mod_base = OTHER; note = phosphorothioate internucleotide linkage
gtccagtgacagaatcaagtt

SEQ ID NO: 391 - RNA, 21 nt, Synthetic construct
  source 1..21: mol_type = other RNA
  misc_feature 1: note = GalNAc3
  modified_base 1..6: mod_base = OTHER; note = 2'-O-methyl ribonucleotide
  modified_base 7: mod_base = OTHER; note = 2'-deoxy-2'-fluoro ribonucleotide
  modified_base 8: mod_base = OTHER; note = 2'-O-methyl ribonucleotide
  modified_base 9..12: mod_base = OTHER; note = 2'-deoxy-2'-fluoro ribonucleotide
  modified_base 13..21: mod_base = OTHER; note = 2'-O-methyl ribonucleotide
  modified_base 19..20: mod_base = OTHER; note = phosphorothioate internucleotide linkage
  modified_base 20..21: mod_base = OTHER; note = phosphorothioate internucleotide linkage
gtccagtgacagaatcaaatt

SEQ ID NO: 392 - RNA, 21 nt, Synthetic construct
  source 1..21: mol_type = other RNA
  misc_feature 1: note = GalNAc3
  modified_base 1..6: mod_base = OTHER; note = 2'-O-methyl ribonucleotide
  modified_base 7: mod_base = OTHER; note = 2'-deoxy-2'-fluoro ribonucleotide
  modified_base 8: mod_base = OTHER; note = 2'-O-methyl ribonucleotide
  modified_base 9..12: mod_base = OTHER; note = 2'-deoxy-2'-fluoro ribonucleotide
  modified_base 13..21: mod_base = OTHER; note = 2'-O-methyl ribonucleotide
  modified_base 19..20: mod_base = OTHER; note = phosphorothioate internucleotide linkage
  modified_base 20..21: mod_base = OTHER; note = phosphorothioate internucleotide linkage
tccagtgacagaatcaagttt

SEQ ID NO: 393 - RNA, 21 nt, Synthetic construct
  source 1..21: mol_type = other RNA
  misc_feature 1: note = GalNAc3
  modified_base 1..6: mod_base = OTHER; note = 2'-O-methyl ribonucleotide
  modified_base 7: mod_base = OTHER; note = 2'-deoxy-2'-fluoro ribonucleotide
  modified_base 8: mod_base = OTHER; note = 2'-O-methyl ribonucleotide
  modified_base 9..12: mod_base = OTHER; note = 2'-deoxy-2'-fluoro ribonucleotide
  modified_base 13..21: mod_base = OTHER; note = 2'-O-methyl ribonucleotide
  modified_base 19..20: mod_base = OTHER; note = phosphorothioate internucleotide linkage
  modified_base 20..21: mod_base = OTHER; note = phosphorothioate internucleotide linkage
ccagtgacagaatcaagtatt

SEQ ID NO: 394 - RNA, 22 nt, Synthetic construct
  source 1..22: mol_type = other RNA
  misc_feature 1: note = GalNAc3
  misc_feature 2: note = invAb
  modified_base 2..9: mod_base = OTHER; note = 2'-O-methyl ribonucleotide
  modified_base 10: mod_base = OTHER; note = 2'-deoxy-2'-fluoro ribonucleotide
  modified_base 11: mod_base = OTHER; note = 2'-O-methyl ribonucleotide
  modified_base 12..15: mod_base = OTHER; note = 2'-deoxy-2'-fluoro ribonucleotide
  modified_base 16..22: mod_base = OTHER; note = 2'-O-methyl ribonucleotide
  modified_base 1: mod_base = OTHER; note = phosphorothioate internucleotide linkage
  modified_base 20..21: mod_base = OTHER; note = phosphorothioate internucleotide linkage
  modified_base 21..22: mod_base = OTHER; note = phosphorothioate internucleotide linkage
ngtccagtgacagaatcaagta

SEQ ID NO: 395 - RNA, 21 nt, Synthetic construct
  source 1..21: mol_type = other RNA
  misc_feature 1: note = GalNAc3
  misc_feature 21: note = invAb
  modified_base 1..6: mod_base = OTHER; note = 2'-O-methyl ribonucleotide
  modified_base 7: mod_base = OTHER; note = 2'-deoxy-2'-fluoro ribonucleotide
  modified_base 8: mod_base = OTHER; note = 2'-O-methyl ribonucleotide
  modified_base 9..12: mod_base = OTHER; note = 2'-deoxy-2'-fluoro ribonucleotide
  modified_base 13..20: mod_base = OTHER; note = 2'-O-methyl ribonucleotide
  modified_base 1: mod_base = OTHER; note = phosphorothioate internucleotide linkage
  modified_base 20..21: mod_base = OTHER; note = phosphorothioate internucleotide linkage
gtccagtgacagaatcaagtn

SEQ ID NO: 396 - RNA, 21 nt, Synthetic construct
  source 1..21: mol_type = other RNA
  misc_feature 1: note = GalNAc3
  misc_feature 21: note = invAb
  modified_base 1..8: mod_base = OTHER; note = 2'-O-methyl ribonucleotide
  modified_base 9: mod_base = OTHER; note = 2'-deoxy-2'-fluoro ribonucleotide
  modified_base 10: mod_base = OTHER; note = 2'-O-methyl ribonucleotide
  modified_base 11..14: mod_base = OTHER; note = 2'-deoxy-2'-fluoro ribonucleotide
  modified_base 15..20: mod_base = OTHER; note = 2'-O-methyl ribonucleotide
  modified_base 1: mod_base = OTHER; note = phosphorothioate internucleotide linkage
  modified_base 20..21: mod_base = OTHER; note = phosphorothioate internucleotide linkage
gtccagtgacagaatcaagtn

SEQ ID NO: 397 - RNA, 21 nt, Synthetic construct
  source 1..21: mol_type = other RNA
  misc_feature 1: note = GalNAc3
  misc_feature 21: note = invAb
  modified_base 1..6: mod_base = OTHER; note = 2'-O-methyl ribonucleotide
  modified_base 7: mod_base = OTHER; note = 2'-deoxy-2'-fluoro ribonucleotide
  modified_base 8: mod_base = OTHER; note = 2'-O-methyl ribonucleotide
  modified_base 9..12: mod_base = OTHER; note = 2'-deoxy-2'-fluoro ribonucleotide
  modified_base 13..20: mod_base = OTHER; note = 2'-O-methyl ribonucleotide
  modified_base 1: mod_base = OTHER; note = phosphorothioate internucleotide linkage
  modified_base 20..21: mod_base = OTHER; note = phosphorothioate internucleotide linkage
ccagtgacagaatcaagtatn

SEQ ID NO: 398 - RNA, 22 nt, Synthetic construct
  source 1..22: mol_type = other RNA
  misc_feature 1: note = GalNAc3
  misc_feature 2: note = invAb
  modified_base 2..7: mod_base = OTHER; note = 2'-O-methyl ribonucleotide
  modified_base 8..11: mod_base = OTHER; note = 2'-deoxy-2'-fluoro ribonucleotide
  modified_base 12..22: mod_base = OTHER; note = 2'-O-methyl ribonucleotide
  modified_base 1: mod_base = OTHER; note = phosphorothioate internucleotide linkage
  modified_base 20..21: mod_base = OTHER; note = phosphorothioate internucleotide linkage
  modified_base 21..22: mod_base = OTHER; note = phosphorothioate internucleotide linkage
nccagtgacagaatcaagtatt

SEQ ID NO: 399 - RNA, 21 nt, Synthetic construct
  source 1..21: mol_type = other RNA
  misc_feature 1: note = GalNAc3
  misc_feature 21: note = invAb
  modified_base 1..6: mod_base = OTHER; note = 2'-O-methyl ribonucleotide
  modified_base 7: mod_base = OTHER; note = 2'-deoxy-2'-fluoro ribonucleotide
  modified_base 8: mod_base = OTHER; note = 2'-O-methyl ribonucleotide
  modified_base 9: mod_base = OTHER; note = 2'-deoxy-2'-fluoro ribonucleotide
  modified_base 10: mod_base = OTHER; note = 2'-O-methyl ribonucleotide
  modified_base 11..12: mod_base = OTHER; note = 2'-deoxy-2'-fluoro ribonucleotide
  modified_base 13..20: mod_base = OTHER; note = 2'-O-methyl ribonucleotide
  modified_base 1: mod_base = OTHER; note = phosphorothioate internucleotide linkage
  modified_base 20..21: mod_base = OTHER; note = phosphorothioate internucleotide linkage
ccagtgacagaatcaagtatn

SEQ ID NO: 400 - RNA, 21 nt, Synthetic construct
  source 1..21: mol_type = other RNA
  misc_feature 1: note = GalNAc3
  misc_feature 21: note = invAb
  modified_base 1..6: mod_base = OTHER; note = 2'-O-methyl ribonucleotide
  modified_base 7..10: mod_base = OTHER; note = 2'-deoxy-2'-fluoro ribonucleotide
  modified_base 11..20: mod_base = OTHER; note = 2'-O-methyl ribonucleotide
  modified_base 1: mod_base = OTHER; note = phosphorothioate internucleotide linkage
  modified_base 20..21: mod_base = OTHER; note = phosphorothioate internucleotide linkage
ccagtgacagaatcaagtatn

SEQ ID NO: 401 - RNA, 19 nt, Synthetic construct
  source 1..19: mol_type = other RNA
  misc_feature 1: note = GalNAc3
  misc_feature 19: note = invAb
  modified_base 1..6: mod_base = OTHER; note = 2'-O-methyl ribonucleotide
  modified_base 7: mod_base = OTHER; note = 2'-deoxy-2'-fluoro ribonucleotide
  modified_base 8: mod_base = OTHER; note = 2'-O-methyl ribonucleotide
  modified_base 9: mod_base = OTHER; note = 2'-deoxy-2'-fluoro ribonucleotide
  modified_base 10: mod_base = OTHER; note = 2'-O-methyl ribonucleotide
  modified_base 11..12: mod_base = OTHER; note = 2'-deoxy-2'-fluoro ribonucleotide
  modified_base 13..18: mod_base = OTHER; note = 2'-O-methyl ribonucleotide
  modified_base 1: mod_base = OTHER; note = phosphorothioate internucleotide linkage
  modified_base 18..19: mod_base = OTHER; note = phosphorothioate internucleotide linkage
ccagtgacagaatcaagtn

SEQ ID NO: 402 - RNA, 19 nt, Synthetic construct
  source 1..19: mol_type = other RNA
  misc_feature 1: note = GalNAc3
  misc_feature 19: note = invAb
  modified_base 1..6: mod_base = OTHER; note = 2'-O-methyl ribonucleotide
  modified_base 7: mod_base = OTHER; note = 2'-deoxy-2'-fluoro ribonucleotide
  modified_base 8: mod_base = OTHER; note = 2'-O-methyl ribonucleotide
  modified_base 9..10: mod_base = OTHER; note = 2'-deoxy-2'-fluoro ribonucleotide
  modified_base 11..18: mod_base = OTHER; note = 2'-O-methyl ribonucleotide
  modified_base 1: mod_base = OTHER; note = phosphorothioate internucleotide linkage
  modified_base 18..19: mod_base = OTHER; note = phosphorothioate internucleotide linkage
ccagtgacagaatcaagtn

SEQ ID NO: 403 - RNA, 19 nt, Synthetic construct
  source 1..19: mol_type = other RNA
  misc_feature 1: note = GalNAc3
  misc_feature 19: note = invAb
  modified_base 1..6: mod_base = OTHER; note = 2'-O-methyl ribonucleotide
  modified_base 7..10: mod_base = OTHER; note = 2'-deoxy-2'-fluoro ribonucleotide
  modified_base 11..18: mod_base = OTHER; note = 2'-O-methyl ribonucleotide
  modified_base 1: mod_base = OTHER; note = phosphorothioate internucleotide linkage
  modified_base 18..19: mod_base = OTHER; note = phosphorothioate internucleotide linkage
ccagtgacagaatcaagtn

SEQ ID NO: 404 - RNA, 21 nt, Synthetic construct
  source 1..21: mol_type = other RNA
  misc_feature 1: note = GalNAc3
  misc_feature 21: note = invAb
  modified_base 1..6: mod_base = OTHER; note = 2'-O-methyl ribonucleotide
  modified_base 7: mod_base = OTHER; note = 2'-deoxy-2'-fluoro ribonucleotide
  modified_base 8: mod_base = OTHER; note = 2'-O-methyl ribonucleotide
  modified_base 9: mod_base = OTHER; note = 2'-deoxy-2'-fluoro ribonucleotide
  modified_base 10: mod_base = OTHER; note = 2'-O-methyl ribonucleotide
  modified_base 11..12: mod_base = OTHER; note = 2'-deoxy-2'-fluoro ribonucleotide
  modified_base 13..20: mod_base = OTHER; note = 2'-O-methyl ribonucleotide
  modified_base 1: mod_base = OTHER; note = phosphorothioate internucleotide linkage
  modified_base 20..21: mod_base = OTHER; note = phosphorothioate internucleotide linkage
gtccagtgacagaatcaagtn

SEQ ID NO: 405 - RNA, 21 nt, Synthetic construct
  source 1..21: mol_type = other RNA
  misc_feature 1: note = GalNAc3
  misc_feature 21: note = invAb
  modified_base 1..8: mod_base = OTHER; note = 2'-O-methyl ribonucleotide
  modified_base 9..12: mod_base = OTHER; note = 2'-deoxy-2'-fluoro ribonucleotide
  modified_base 13..20: mod_base = OTHER; note = 2'-O-methyl ribonucleotide
  modified_base 1: mod_base = OTHER; note = phosphorothioate internucleotide linkage
  modified_base 20..21: mod_base = OTHER; note = phosphorothioate internucleotide linkage
gtccagtgacagaatcaagtn

SEQ ID NO: 406 - RNA, 21 nt, Synthetic construct
  source 1..21: mol_type = other RNA
  misc_feature 1: note = GalNAc3
  modified_base 1..6: mod_base = OTHER; note = 2'-O-methyl ribonucleotide
  modified_base 7: mod_base = OTHER; note = 2'-deoxy-2'-fluoro ribonucleotide
  modified_base 8: mod_base = OTHER; note = 2'-O-methyl ribonucleotide
  modified_base 9..12: mod_base = OTHER; note = 2'-deoxy-2'-fluoro ribonucleotide
  modified_base 13..21: mod_base = OTHER; note = 2'-O-methyl ribonucleotide
  modified_base 19..20: mod_base = OTHER; note = phosphorothioate internucleotide linkage
  modified_base 20..21: mod_base = OTHER; note = phosphorothioate internucleotide linkage
caccactgttacaggaaggtt

SEQ ID NO: 407 - RNA, 21 nt, Synthetic construct
  source 1..21: mol_type = other RNA
  misc_feature 1: note = GalNAc3
  modified_base 1..6: mod_base = OTHER; note = 2'-O-methyl ribonucleotide
  modified_base 7: mod_base = OTHER; note = 2'-deoxy-2'-fluoro ribonucleotide
  modified_base 8: mod_base = OTHER; note = 2'-O-methyl ribonucleotide
  modified_base 9..12: mod_base = OTHER; note = 2'-deoxy-2'-fluoro ribonucleotide
  modified_base 13..21: mod_base = OTHER; note = 2'-O-methyl ribonucleotide
  modified_base 19..20: mod_base = OTHER; note = phosphorothioate internucleotide linkage
  modified_base 20..21: mod_base = OTHER; note = phosphorothioate internucleotide linkage
caccactgttacaggaagatt

SEQ ID NO: 408 - RNA, 21 nt, Synthetic construct
  source 1..21: mol_type = other RNA
  misc_feature 1: note = GalNAc3
  misc_feature 21: note = invAb
  modified_base 1..6: mod_base = OTHER; note = 2'-O-methyl ribonucleotide
  modified_base 7: mod_base = OTHER; note = 2'-deoxy-2'-fluoro ribonucleotide
  modified_base 8: mod_base = OTHER; note = 2'-O-methyl ribonucleotide
  modified_base 9..12: mod_base = OTHER; note = 2'-deoxy-2'-fluoro ribonucleotide
  modified_base 13..20: mod_base = OTHER; note = 2'-O-methyl ribonucleotide
  modified_base 1: mod_base = OTHER; note = phosphorothioate internucleotide linkage
  modified_base 20..21: mod_base = OTHER; note = phosphorothioate internucleotide linkage
cagaatactacccaaatggtn

SEQ ID NO: 409 - RNA, 21 nt, Synthetic construct
  source 1..21: mol_type = other RNA
  misc_feature 1: note = GalNAc3
  modified_base 1..6: mod_base = OTHER; note = 2'-O-methyl ribonucleotide
  modified_base 7: mod_base = OTHER; note = 2'-deoxy-2'-fluoro ribonucleotide
  modified_base 8: mod_base = OTHER; note = 2'-O-methyl ribonucleotide
  modified_base 9..12: mod_base = OTHER; note = 2'-deoxy-2'-fluoro ribonucleotide
  modified_base 13..21: mod_base = OTHER; note = 2'-O-methyl ribonucleotide
  modified_base 19..20: mod_base = OTHER; note = phosphorothioate internucleotide linkage
  modified_base 20..21: mod_base = OTHER; note = phosphorothioate internucleotide linkage
cccaaatggtggcctgacctt

SEQ ID NO: 410 - RNA, 21 nt, Synthetic construct
  source 1..21: mol_type = other RNA
  misc_feature 1: note = GalNAc3
  modified_base 1..6: mod_base = OTHER; note = 2'-O-methyl ribonucleotide
  modified_base 7: mod_base = OTHER; note = 2'-deoxy-2'-fluoro ribonucleotide
  modified_base 8: mod_base = OTHER; note = 2'-O-methyl ribonucleotide
  modified_base 9..12: mod_base = OTHER; note = 2'-deoxy-2'-fluoro ribonucleotide
  modified_base 13..21: mod_base = OTHER; note = 2'-O-methyl ribonucleotide
  modified_base 19..20: mod_base = OTHER; note = phosphorothioate internucleotide linkage
  modified_base 20..21: mod_base = OTHER; note = phosphorothioate internucleotide linkage
tataccatggatcccagtgtt

SEQ ID NO: 411 - RNA, 21 nt, Synthetic construct
  source 1..21: mol_type = other RNA
  misc_feature 1: note = GalNAc3
  modified_base 1..6: mod_base = OTHER; note = 2'-O-methyl ribonucleotide
  modified_base 7: mod_base = OTHER; note = 2'-deoxy-2'-fluoro ribonucleotide
  modified_base 8: mod_base = OTHER; note = 2'-O-methyl ribonucleotide
  modified_base 9..12: mod_base = OTHER; note = 2'-deoxy-2'-fluoro ribonucleotide
  modified_base 13..21: mod_base = OTHER; note = 2'-O-methyl ribonucleotide
  modified_base 19..20: mod_base = OTHER; note = phosphorothioate internucleotide linkage
  modified_base 20..21: mod_base = OTHER; note = phosphorothioate internucleotide linkage
tataccatggatcccagtatt

SEQ ID NO: 412 - RNA, 21 nt, Synthetic construct
  source 1..21: mol_type = other RNA
  misc_feature 1: note = GalNAc3
  modified_base 1..6: mod_base = OTHER; note = 2'-O-methyl ribonucleotide
  modified_base 7: mod_base = OTHER; note = 2'-deoxy-2'-fluoro ribonucleotide
  modified_base 8: mod_base = OTHER; note = 2'-O-methyl ribonucleotide
  modified_base 9..12: mod_base = OTHER; note = 2'-deoxy-2'-fluoro ribonucleotide
  modified_base 13..21: mod_base = OTHER; note = 2'-O-methyl ribonucleotide
  modified_base 19..20: mod_base = OTHER; note = phosphorothioate internucleotide linkage
  modified_base 20..21: mod_base = OTHER; note = phosphorothioate internucleotide linkage
ttctgaagaagcaccaacttt

SEQ ID NO: 413 - RNA, 22 nt, Synthetic construct
  source 1..22: mol_type = other RNA
  misc_feature 1: note = GalNAc3
  misc_feature 1: note = invAb
  modified_base 2..7: mod_base = OTHER; note = 2'-O-methyl ribonucleotide
  modified_base 8: mod_base = OTHER; note = 2'-deoxy-2'-fluoro ribonucleotide
  modified_base 9: mod_base = OTHER; note = 2'-O-methyl ribonucleotide
  modified_base 10..13: mod_base = OTHER; note = 2'-deoxy-2'-fluoro ribonucleotide
  modified_base 14..22: mod_base = OTHER; note = 2'-O-methyl ribonucleotide
  modified_base 20..21: mod_base = OTHER; note = phosphorothioate internucleotide linkage
  modified_base 21..22: mod_base = OTHER; note = phosphorothioate internucleotide linkage
nttctgaagaagcaccaacttt

SEQ ID NO: 414 - RNA, 21 nt, Synthetic construct
  source 1..21: mol_type = other RNA
  misc_feature 1: note = GalNAc3
  modified_base 1..8: mod_base = OTHER; note = 2'-O-methyl ribonucleotide
  modified_base 9: mod_base = OTHER; note = 2'-deoxy-2'-fluoro ribonucleotide
  modified_base 10: mod_base = OTHER; note = 2'-O-methyl ribonucleotide
  modified_base 11..14: mod_base = OTHER; note = 2'-deoxy-2'-fluoro ribonucleotide
  modified_base 15..21: mod_base = OTHER; note = 2'-O-methyl ribonucleotide
  modified_base 19..20: mod_base = OTHER; note = phosphorothioate internucleotide linkage
  modified_base 20..21: mod_base = OTHER; note = phosphorothioate internucleotide linkage
ccttctgaagaagcaccaact

SEQ ID NO: 415 - RNA, 22 nt, Synthetic construct
  source 1..22: mol_type = other RNA
  misc_feature 1: note = GalNAc3
  misc_feature 1: note = invAb
  misc_feature 22: note = invAb
  modified_base 2..9: mod_base = OTHER; note = 2'-O-methyl ribonucleotide
  modified_base 10: mod_base = OTHER; note = 2'-deoxy-2'-fluoro ribonucleotide
  modified_base 11: mod_base = OTHER; note = 2'-O-methyl ribonucleotide
  modified_base 12..15: mod_base = OTHER; note = 2'-deoxy-2'-fluoro ribonucleotide
  modified_base 16..21: mod_base = OTHER; note = 2'-O-methyl ribonucleotide
  modified_base 21..22: mod_base = OTHER; note = phosphorothioate internucleotide linkage
nccttctgaagaagcaccaacn

SEQ ID NO: 416 - RNA, 21 nt, Synthetic construct
  source 1..21: mol_type = other RNA
  misc_feature 1: note = GalNAc3
  misc_feature 21: note = invAb
  modified_base 1..6: mod_base = OTHER; note = 2'-O-methyl ribonucleotide
  modified_base 7: mod_base = OTHER; note = 2'-deoxy-2'-fluoro ribonucleotide
  modified_base 8: mod_base = OTHER; note = 2'-O-methyl ribonucleotide
  modified_base 9..12: mod_base = OTHER; note = 2'-deoxy-2'-fluoro ribonucleotide
  modified_base 13..20: mod_base = OTHER; note = 2'-O-methyl ribonucleotide
  modified_base 20..21: mod_base = OTHER; note = phosphorothioate internucleotide linkage
ccttctgaagaagcaccaacn

SEQ ID NO: 417 - RNA, 22 nt, Synthetic construct
  source 1..22: mol_type = other RNA
  misc_feature 1: note = GalNAc3
  misc_feature 1: note = invAb
  modified_base 2..9: mod_base = OTHER; note = 2'-O-methyl ribonucleotide
  modified_base 10: mod_base = OTHER; note = 2'-deoxy-2'-fluoro ribonucleotide
  modified_base 11: mod_base = OTHER; note = 2'-O-methyl ribonucleotide
  modified_base 12..15: mod_base = OTHER; note = 2'-deoxy-2'-fluoro ribonucleotide
  modified_base 16..22: mod_base = OTHER; note = 2'-O-methyl ribonucleotide
  modified_base 20..21: mod_base = OTHER; note = phosphorothioate internucleotide linkage
  modified_base 21..22: mod_base = OTHER; note = phosphorothioate internucleotide linkage
nccttctgaagaagcaccaact

SEQ ID NO: 418 - RNA, 22 nt, Synthetic construct
  source 1..22: mol_type = other RNA
  misc_feature 1: note = GalNAc3
  misc_feature 2: note = invAb
  modified_base 2..7: mod_base = OTHER; note = 2'-O-methyl ribonucleotide
  modified_base 8: mod_base = OTHER; note = 2'-deoxy-2'-fluoro ribonucleotide
  modified_base 9: mod_base = OTHER; note = 2'-O-methyl ribonucleotide
  modified_base 10..13: mod_base = OTHER; note = 2'-deoxy-2'-fluoro ribonucleotide
  modified_base 14..22: mod_base = OTHER; note = 2'-O-methyl ribonucleotide
  modified_base 1: mod_base = OTHER; note = phosphorothioate internucleotide linkage
  modified_base 20..21: mod_base = OTHER; note = phosphorothioate internucleotide linkage
  modified_base 21..22: mod_base = OTHER; note = phosphorothioate internucleotide linkage
nttctgaagaagcaccaacttt

SEQ ID NO: 419 - RNA, 21 nt, Synthetic construct
  source 1..21: mol_type = other RNA
  misc_feature 1: note = GalNAc3
  misc_feature 21: note = invAb
  modified_base 1..8: mod_base = OTHER; note = 2'-O-methyl ribonucleotide
  modified_base 9: mod_base = OTHER; note = 2'-deoxy-2'-fluoro ribonucleotide
  modified_base 10: mod_base = OTHER; note = 2'-O-methyl ribonucleotide
  modified_base 11..14: mod_base = OTHER; note = 2'-deoxy-2'-fluoro ribonucleotide
  modified_base 15..20: mod_base = OTHER; note = 2'-O-methyl ribonucleotide
  modified_base 1: mod_base = OTHER; note = phosphorothioate internucleotide linkage
  modified_base 20..21: mod_base = OTHER; note = phosphorothioate internucleotide linkage
ccttctgaagaagcaccaacn

SEQ ID NO: 420 - RNA, 22 nt, Synthetic construct
  source 1..22: mol_type = other RNA
  misc_feature 1: note = GalNAc3
  misc_feature 2: note = invAb
  modified_base 2..9: mod_base = OTHER; note = 2'-O-methyl ribonucleotide
  modified_base 10: mod_base = OTHER; note = 2'-deoxy-2'-fluoro ribonucleotide
  modified_base 11: mod_base = OTHER; note = 2'-O-methyl ribonucleotide
  modified_base 12..15: mod_base = OTHER; note = 2'-deoxy-2'-fluoro ribonucleotide
  modified_base 16..22: mod_base = OTHER; note = 2'-O-methyl ribonucleotide
  modified_base 1: mod_base = OTHER; note = phosphorothioate internucleotide linkage
  modified_base 20..21: mod_base = OTHER; note = phosphorothioate internucleotide linkage
  modified_base 21..22: mod_base = OTHER; note = phosphorothioate internucleotide linkage
nccttctgaagaagcaccaact

SEQ ID NO: 421 - RNA, 21 nt, Synthetic construct
  source 1..21: mol_type = other RNA
  misc_feature 1: note = GalNAc3
  modified_base 1: mod_base = OTHER; note = 2'-deoxy-2'-fluoro ribonucleotide
  modified_base 2: mod_base = OTHER; note = 2'-O-methyl ribonucleotide
  modified_base 3: mod_base = OTHER; note = 2'-deoxy-2'-fluoro ribonucleotide
  modified_base 4: mod_base = OTHER; note = 2'-O-methyl ribonucleotide
  modified_base 5: mod_base = OTHER; note = 2'-deoxy-2'-fluoro ribonucleotide
  modified_base 6: mod_base = OTHER; note = 2'-O-methyl ribonucleotide
  modified_base 7: mod_base = OTHER; note = 2'-deoxy-2'-fluoro ribonucleotide
  modified_base 8: mod_base = OTHER; note = 2'-O-methyl ribonucleotide
  modified_base 9..12: mod_base = OTHER; note = 2'-deoxy-2'-fluoro ribonucleotide
  modified_base 13..14: mod_base = OTHER; note = 2'-O-methyl ribonucleotide
  modified_base 15: mod_base = OTHER; note = 2'-deoxy-2'-fluoro ribonucleotide
  modified_base 16: mod_base = OTHER; note = 2'-O-methyl ribonucleotide
  modified_base 17: mod_base = OTHER; note = 2'-deoxy-2'-fluoro ribonucleotide
  modified_base 18: mod_base = OTHER; note = 2'-O-methyl ribonucleotide
  modified_base 19: mod_base = OTHER; note = 2'-deoxy-2'-fluoro ribonucleotide
  modified_base 20: mod_base = OTHER; note = 2'-O-methyl ribonucleotide
  modified_base 21: mod_base = OTHER; note = 2'-deoxy-2'-fluoro ribonucleotide
  modified_base 19..20: mod_base = OTHER; note = phosphorothioate internucleotide linkage
  modified_base 20..21: mod_base = OTHER; note = phosphorothioate internucleotide linkage
ctgaagaagcaccaactgatt

SEQ ID NO: 422 - RNA, 21 nt, Synthetic construct
  source 1..21: mol_type = other RNA
  misc_feature 1: note = GalNAc3
  modified_base 1..6: mod_base = OTHER; note = 2'-O-methyl ribonucleotide
  modified_base 7: mod_base = OTHER; note = 2'-deoxy-2'-fluoro ribonucleotide
  modified_base 8: mod_base = OTHER; note = 2'-O-methyl ribonucleotide
  modified_base 9..12: mod_base = OTHER; note = 2'-deoxy-2'-fluoro ribonucleotide
  modified_base 13..21: mod_base = OTHER; note = 2'-O-methyl ribonucleotide
  modified_base 19..20: mod_base = OTHER; note = phosphorothioate internucleotide linkage
  modified_base 20..21: mod_base = OTHER; note = phosphorothioate internucleotide linkage
agcaccaactgaaaacagttt

SEQ ID NO: 423 - RNA, 22 nt, Synthetic construct
  source 1..22: mol_type = other RNA
  misc_feature 1: note = GalNAc3
  misc_feature 2: note = invAb
  misc_feature 22: note = invAb
  modified_base 2..9: mod_base = OTHER; note = 2'-O-methyl ribonucleotide
  modified_base 10: mod_base = OTHER; note = 2'-deoxy-2'-fluoro ribonucleotide
  modified_base 11: mod_base = OTHER; note = 2'-O-methyl ribonucleotide
  modified_base 12..15: mod_base = OTHER; note = 2'-deoxy-2'-fluoro ribonucleotide
  modified_base 16..21: mod_base = OTHER; note = 2'-O-methyl ribonucleotide
  modified_base 1: mod_base = OTHER; note = phosphorothioate internucleotide linkage
  modified_base 21..22: mod_base = OTHER; note = phosphorothioate internucleotide linkage
ngaagcaccaactgaaaacagn

SEQ ID NO: 424 - RNA, 21 nt, Synthetic construct
  source 1..21: mol_type = other RNA
  misc_feature 1: note = GalNAc3
  modified_base 1..6: mod_base = OTHER; note = 2'-O-methyl ribonucleotide
  modified_base 7: mod_base = OTHER; note = 2'-deoxy-2'-fluoro ribonucleotide
  modified_base 8: mod_base = OTHER; note = 2'-O-methyl ribonucleotide
  modified_base 9..12: mod_base = OTHER; note = 2'-deoxy-2'-fluoro ribonucleotide
  modified_base 13..21: mod_base = OTHER; note = 2'-O-methyl ribonucleotide
  modified_base 19..20: mod_base = OTHER; note = phosphorothioate internucleotide linkage
  modified_base 20..21: mod_base = OTHER; note = phosphorothioate internucleotide linkage
cccggttccaagcacagaatt

SEQ ID NO: 425 - RNA, 21 nt, Synthetic construct
  source 1..21: mol_type = other RNA
  misc_feature 1: note = GalNAc3
  modified_base 1..6: mod_base = OTHER; note = 2'-O-methyl ribonucleotide
  modified_base 7: mod_base = OTHER; note = 2'-deoxy-2'-fluoro ribonucleotide
  modified_base 8: mod_base = OTHER; note = 2'-O-methyl ribonucleotide
  modified_base 9..12: mod_base = OTHER; note = 2'-deoxy-2'-fluoro ribonucleotide
  modified_base 13..21: mod_base = OTHER; note = 2'-O-methyl ribonucleotide
  modified_base 19..20: mod_base = OTHER; note = phosphorothioate internucleotide linkage
  modified_base 20..21: mod_base = OTHER; note = phosphorothioate internucleotide linkage
agcacagaggctccttctatt

SEQ ID NO: 426 - RNA, 21 nt, Synthetic construct
  source 1..21: mol_type = other RNA
  misc_feature 1: note = GalNAc3
  modified_base 1..6: mod_base = OTHER; note = 2'-O-methyl ribonucleotide
  modified_base 7: mod_base = OTHER; note = 2'-deoxy-2'-fluoro ribonucleotide
  modified_base 8: mod_base = OTHER; note = 2'-O-methyl ribonucleotide
  modified_base 9..12: mod_base = OTHER; note = 2'-deoxy-2'-fluoro ribonucleotide
  modified_base 13..21: mod_base = OTHER; note = 2'-O-methyl ribonucleotide
  modified_base 19..20: mod_base = OTHER; note = phosphorothioate internucleotide linkage
  modified_base 20..21: mod_base = OTHER; note = phosphorothioate internucleotide linkage
ccttctgaacaagcaccactt

SEQ ID NO: 427 - RNA, 21 nt, Synthetic construct
  source 1..21: mol_type = other RNA
  misc_feature 1: note = GalNAc3
  modified_base 1..6: mod_base = OTHER; note = 2'-O-methyl ribonucleotide
  modified_base 7: mod_base = OTHER; note = 2'-deoxy-2'-fluoro ribonucleotide
  modified_base 8: mod_base = OTHER; note = 2'-O-methyl ribonucleotide
  modified_base 9..12: mod_base = OTHER; note = 2'-deoxy-2'-fluoro ribonucleotide
  modified_base 13..21: mod_base = OTHER; note = 2'-O-methyl ribonucleotide
  modified_base 19..20: mod_base = OTHER; note = phosphorothioate internucleotide linkage
  modified_base 20..21: mod_base = OTHER; note = phosphorothioate internucleotide linkage
ccttctgaacaagcaccattt

SEQ ID NO: 428 - RNA, 21 nt, Synthetic construct
  source 1..21: mol_type = other RNA
  misc_feature 1: note = GalNAc3
  modified_base 1..6: mod_base = OTHER; note = 2'-O-methyl ribonucleotide
  modified_base 7: mod_base = OTHER; note = 2'-deoxy-2'-fluoro ribonucleotide
  modified_base 8: mod_base = OTHER; note = 2'-O-methyl ribonucleotide
  modified_base 9..12: mod_base = OTHER; note = 2'-deoxy-2'-fluoro ribonucleotide
  modified_base 13..21: mod_base = OTHER; note = 2'-O-methyl ribonucleotide
  modified_base 19..20: mod_base = OTHER; note = phosphorothioate internucleotide linkage
  modified_base 20..21: mod_base = OTHER; note = phosphorothioate internucleotide linkage
tcagaaacagaatcaggtatt

SEQ ID NO: 429 - RNA, 21 nt, Synthetic construct
  source 1..21: mol_type = other RNA
  misc_feature 1: note = GalNAc3
  modified_base 1..6: mod_base = OTHER; note = 2'-O-methyl ribonucleotide
  modified_base 7: mod_base = OTHER; note = 2'-deoxy-2'-fluoro ribonucleotide
  modified_base 8: mod_base = OTHER; note = 2'-O-methyl ribonucleotide
  modified_base 9..12: mod_base = OTHER; note = 2'-deoxy-2'-fluoro ribonucleotide
  modified_base 13..21: mod_base = OTHER; note = 2'-O-methyl ribonucleotide
  modified_base 19..20: mod_base = OTHER; note = phosphorothioate internucleotide linkage
  modified_base 20..21: mod_base = OTHER; note = phosphorothioate internucleotide linkage
cagaatcaggtgtcctagatt

SEQ ID NO: 430 - RNA, 21 nt, Synthetic construct
  source 1..21: mol_type = other RNA
  misc_feature 1: note = GalNAc3
  modified_base 1..6: mod_base = OTHER; note = 2'-O-methyl ribonucleotide
  modified_base 7: mod_base = OTHER; note = 2'-deoxy-2'-fluoro ribonucleotide
  modified_base 8: mod_base = OTHER; note = 2'-O-methyl ribonucleotide
  modified_base 9..12: mod_base = OTHER; note = 2'-deoxy-2'-fluoro ribonucleotide
  modified_base 13..21: mod_base = OTHER; note = 2'-O-methyl ribonucleotide
  modified_base 19..20: mod_base = OTHER; note = phosphorothioate internucleotide linkage
  modified_base 20..21: mod_base = OTHER; note = phosphorothioate internucleotide linkage
gttatcgaggcacattctttt

SEQ ID NO: 431 - RNA, 21 nt, Synthetic construct
  source 1..21: mol_type = other RNA
  misc_feature 1: note = GalNAc3
  modified_base 1..6: mod_base = OTHER; note = 2'-O-methyl ribonucleotide
  modified_base 7: mod_base = OTHER; note = 2'-deoxy-2'-fluoro ribonucleotide
  modified_base 8: mod_base = OTHER; note = 2'-O-methyl ribonucleotide
  modified_base 9..12: mod_base = OTHER; note = 2'-deoxy-2'-fluoro ribonucleotide
  modified_base 13..21: mod_base = OTHER; note = 2'-O-methyl ribonucleotide
  modified_base 19..20: mod_base = OTHER; note = phosphorothioate internucleotide linkage
  modified_base 20..21: mod_base = OTHER; note = phosphorothioate internucleotide linkage
ttatcgaggcacattctcctt

SEQ ID NO: 432 - RNA, 21 nt, Synthetic construct
  source 1..21: mol_type = other RNA
  misc_feature 1: note = GalNAc3
  modified_base 1..6: mod_base = OTHER; note = 2'-O-methyl ribonucleotide
  modified_base 7: mod_base = OTHER; note = 2'-deoxy-2'-fluoro ribonucleotide
  modified_base 8: mod_base = OTHER; note = 2'-O-methyl ribonucleotide
  modified_base 9..12: mod_base = OTHER; note = 2'-deoxy-2'-fluoro ribonucleotide
  modified_base 13..21: mod_base = OTHER; note = 2'-O-methyl ribonucleotide
  modified_base 19..20: mod_base = OTHER; note = phosphorothioate internucleotide linkage
  modified_base 20..21: mod_base = OTHER; note = phosphorothioate internucleotide linkage
ttatcgaggcacattctcttt

SEQ ID NO: 433 - RNA, 21 nt, Synthetic construct
  source 1..21: mol_type = other RNA
  misc_feature 1: note = GalNAc3
  modified_base 1..6: mod_base = OTHER; note = 2'-O-methyl ribonucleotide
  modified_base 7: mod_base = OTHER; note = 2'-deoxy-2'-fluoro ribonucleotide
  modified_base 8: mod_base = OTHER; note = 2'-O-methyl ribonucleotide
  modified_base 9..12: mod_base = OTHER; note = 2'-deoxy-2'-fluoro ribonucleotide
  modified_base 13..21: mod_base = OTHER; note = 2'-O-methyl ribonucleotide
  modified_base 19..20: mod_base = OTHER; note = phosphorothioate internucleotide linkage
  modified_base 20..21: mod_base = OTHER; note = phosphorothioate internucleotide linkage
acgcgatgctcagacacaatt

SEQ ID NO: 434 - RNA, 21 nt, Synthetic construct
  source 1..21: mol_type = other RNA
  misc_feature 1: note = GalNAc3
  modified_base 1..6: mod_base = OTHER; note = 2'-O-methyl ribonucleotide
  modified_base 7: mod_base = OTHER; note = 2'-deoxy-2'-fluoro ribonucleotide
  modified_base 8: mod_base = OTHER; note = 2'-O-methyl ribonucleotide
  modified_base 9..12: mod_base = OTHER; note = 2'-deoxy-2'-fluoro ribonucleotide
  modified_base 13..21: mod_base = OTHER; note = 2'-O-methyl ribonucleotide
  modified_base 19..20: mod_base = OTHER; note = phosphorothioate internucleotide linkage
  modified_base 20..21: mod_base = OTHER; note = phosphorothioate internucleotide linkage
agacacagaagggactgtatt

SEQ ID NO: 435 - RNA, 21 nt, Synthetic construct
  source 1..21: mol_type = other RNA
  misc_feature 1: note = GalNAc3
  modified_base 1..6: mod_base = OTHER; note = 2'-O-methyl ribonucleotide
  modified_base 7: mod_base = OTHER; note = 2'-deoxy-2'-fluoro ribonucleotide
  modified_base 8: mod_base = OTHER; note = 2'-O-methyl ribonucleotide
  modified_base 9..12: mod_base = OTHER; note = 2'-deoxy-2'-fluoro ribonucleotide
  modified_base 13..21: mod_base = OTHER; note = 2'-O-methyl ribonucleotide
  modified_base 19..20: mod_base = OTHER; note = phosphorothioate internucleotide linkage
  modified_base 20..21: mod_base = OTHER; note = phosphorothioate internucleotide linkage
tgtcctggaagcattgtaatt

SEQ ID NO: 436 - RNA, 21 nt, Synthetic construct
  source 1..21: mol_type = other RNA
  misc_feature 1: note = GalNAc3
  modified_base 1..6: mod_base = OTHER; note = 2'-O-methyl ribonucleotide
  modified_base 7: mod_base = OTHER; note = 2'-deoxy-2'-fluoro ribonucleotide
  modified_base 8: mod_base = OTHER; note = 2'-O-methyl ribonucleotide
  modified_base 9..12: mod_base = OTHER; note = 2'-deoxy-2'-fluoro ribonucleotide
  modified_base 13..21: mod_base = OTHER; note = 2'-O-methyl ribonucleotide
  modified_base 19..20: mod_base = OTHER; note = phosphorothioate internucleotide linkage
  modified_base 20..21: mod_base = OTHER; note = phosphorothioate internucleotide linkage
aacaaggtttggaaagcattt

SEQ ID NO: 437 - RNA, 21 nt, Synthetic construct
  source 1..21: mol_type = other RNA
  misc_feature 1: note = monophosphate
  modified_base 1: mod_base = OTHER; note = 2'-O-methyl ribonucleotide
  modified_base 2: mod_base = OTHER; note = 2'-deoxy-2'-fluoro ribonucleotide
  modified_base 3: mod_base = OTHER; note = 2'-O-methyl ribonucleotide
  modified_base 4: mod_base = OTHER; note = 2'-deoxy-2'-fluoro ribonucleotide
  modified_base 5: mod_base = OTHER; note = 2'-O-methyl ribonucleotide
  modified_base 6..7: mod_base = OTHER; note = 2'-deoxy-2'-fluoro ribonucleotide
  modified_base 8..11: mod_base = OTHER; note = 2'-O-methyl ribonucleotide
  modified_base 12: mod_base = OTHER; note = 2'-deoxy-2'-fluoro ribonucleotide
  modified_base 13: mod_base = OTHER; note = 2'-O-methyl ribonucleotide
  modified_base 14: mod_base = OTHER; note = 2'-deoxy-2'-fluoro ribonucleotide
  modified_base 15..21: mod_base = OTHER; note = 2'-O-methyl ribonucleotide
  modified_base 1..2: mod_base = OTHER; note = phosphorothioate internucleotide linkage
  modified_base 2..3: mod_base = OTHER; note = phosphorothioate internucleotide linkage
  modified_base 19..20: mod_base = OTHER; note = phosphorothioate internucleotide linkage
  modified_base 20..21: mod_base = OTHER; note = phosphorothioate internucleotide linkage
tcacatggctttgctcaggtt

SEQ ID NO: 438 - RNA, 21 nt, Synthetic construct
  source 1..21: mol_type = other RNA
  misc_feature 1: note = monophosphate
  modified_base 1: mod_base = OTHER; note = 2'-O-methyl ribonucleotide
  modified_base 2: mod_base = OTHER; note = 2'-deoxy-2'-fluoro ribonucleotide
  modified_base 3: mod_base = OTHER; note = 2'-O-methyl ribonucleotide
  modified_base 4: mod_base = OTHER; note = 2'-deoxy-2'-fluoro ribonucleotide
  modified_base 5: mod_base = OTHER; note = 2'-O-methyl ribonucleotide
  modified_base 6..7: mod_base = OTHER; note = 2'-deoxy-2'-fluoro ribonucleotide
  modified_base 8..11: mod_base = OTHER; note = 2'-O-methyl ribonucleotide
  modified_base 12: mod_base = OTHER; note = 2'-deoxy-2'-fluoro ribonucleotide
  modified_base 13: mod_base = OTHER; note = 2'-O-methyl ribonucleotide
  modified_base 14: mod_base = OTHER; note = 2'-deoxy-2'-fluoro ribonucleotide
  modified_base 15: mod_base = OTHER; note = 2'-O-methyl ribonucleotide
  modified_base 16: mod_base = OTHER; note = 2'-deoxy-2'-fluoro ribonucleotide
  modified_base 17: mod_base = OTHER; note = 2'-O-methyl ribonucleotide
  modified_base 18: mod_base = OTHER; note = 2'-deoxy-2'-fluoro ribonucleotide
  modified_base 19: mod_base = OTHER; note = 2'-O-methyl ribonucleotide
  modified_base 20: mod_base = OTHER; note = 2'-deoxy-2'-fluoro ribonucleotide
  modified_base 21: mod_base = OTHER; note = 2'-O-methyl ribonucleotide
  modified_base 1..2: mod_base = OTHER; note = phosphorothioate internucleotide linkage
  modified_base 2..3: mod_base = OTHER; note = phosphorothioate internucleotide linkage
  modified_base 19..20: mod_base = OTHER; note = phosphorothioate internucleotide linkage
  modified_base 20..21: mod_base = OTHER; note = phosphorothioate internucleotide linkage
accacatggctttgctcagtt

SEQ ID NO: 439 - RNA, 21 nt, Synthetic construct
  source 1..21: mol_type = other RNA
  misc_feature 1: note = monophosphate
  modified_base 1: mod_base = OTHER; note = 2'-O-methyl ribonucleotide
  modified_base 2: mod_base = OTHER; note = 2'-deoxy-2'-fluoro ribonucleotide
  modified_base 3: mod_base = OTHER; note = 2'-O-methyl ribonucleotide
  modified_base 4: mod_base = OTHER; note = 2'-deoxy-2'-fluoro ribonucleotide
  modified_base 5: mod_base = OTHER; note = 2'-O-methyl ribonucleotide
  modified_base 6..7: mod_base = OTHER; note = 2'-deoxy-2'-fluoro ribonucleotide
  modified_base 8..11: mod_base = OTHER; note = 2'-O-methyl ribonucleotide
  modified_base 12: mod_base = OTHER; note = 2'-deoxy-2'-fluoro ribonucleotide
  modified_base 13: mod_base = OTHER; note = 2'-O-methyl ribonucleotide
  modified_base 14: mod_base = OTHER; note = 2'-deoxy-2'-fluoro ribonucleotide
  modified_base 15..21: mod_base = OTHER; note = 2'-O-methyl ribonucleotide
  modified_base 1..2: mod_base = OTHER; note = phosphorothioate internucleotide linkage
  modified_base 2..3: mod_base = OTHER; note = phosphorothioate internucleotide linkage
  modified_base 19..20: mod_base = OTHER; note = phosphorothioate internucleotide linkage
  modified_base 20..21: mod_base = OTHER; note = phosphorothioate internucleotide linkage
agtagcaatcctggaccactt

SEQ ID NO: 440 - RNA, 21 nt, Synthetic construct
  source 1..21: mol_type = other RNA
  misc_feature 1: note = monophosphate
  modified_base 1: mod_base = OTHER; note = 2'-O-methyl ribonucleotide
  modified_base 2: mod_base = OTHER; note = 2'-deoxy-2'-fluoro ribonucleotide
  modified_base 3: mod_base = OTHER; note = 2'-O-methyl ribonucleotide
  modified_base 4: mod_base = OTHER; note = 2'-deoxy-2'-fluoro ribonucleotide
  modified_base 5: mod_base = OTHER; note = 2'-O-methyl ribonucleotide
  modified_base 6..7: mod_base = OTHER; note = 2'-deoxy-2'-fluoro ribonucleotide
  modified_base 8..11: mod_base = OTHER; note = 2'-O-methyl ribonucleotide
  modified_base 12: mod_base = OTHER; note = 2'-deoxy-2'-fluoro ribonucleotide
  modified_base 13: mod_base = OTHER; note = 2'-O-methyl ribonucleotide
  modified_base 14: mod_base = OTHER; note = 2'-deoxy-2'-fluoro ribonucleotide
  modified_base 15..21: mod_base = OTHER; note = 2'-O-methyl ribonucleotide
  modified_base 1..2: mod_base = OTHER; note = phosphorothioate internucleotide linkage
  modified_base 2..3: mod_base = OTHER; note = phosphorothioate internucleotide linkage
  modified_base 19..20: mod_base = OTHER; note = phosphorothioate internucleotide linkage
  modified_base 20..21: mod_base = OTHER; note = phosphorothioate internucleotide linkage
tttgggtagttttctgtggtt

SEQ ID NO: 441 - RNA, 21 nt, Synthetic construct
  source 1..21: mol_type = other RNA
  misc_feature 1: note = monophosphate
  modified_base 1: mod_base = OTHER; note = 2'-O-methyl ribonucleotide
  modified_base 2: mod_base = OTHER; note = 2'-deoxy-2'-fluoro ribonucleotide
  modified_base 3: mod_base = OTHER; note = 2'-O-methyl ribonucleotide
  modified_base 4: mod_base = OTHER; note = 2'-deoxy-2'-fluoro ribonucleotide
  modified_base 5: mod_base = OTHER; note = 2'-O-methyl ribonucleotide
  modified_base 6..7: mod_base = OTHER; note = 2'-deoxy-2'-fluoro ribonucleotide
  modified_base 8..11: mod_base = OTHER; note = 2'-O-methyl ribonucleotide
  modified_base 12: mod_base = OTHER; note = 2'-deoxy-2'-fluoro ribonucleotide
  modified_base 13: mod_base = OTHER; note = 2'-O-methyl ribonucleotide
  modified_base 14: mod_base = OTHER; note = 2'-deoxy-2'-fluoro ribonucleotide
  modified_base 15..21: mod_base = OTHER; note = 2'-O-methyl ribonucleotide
  modified_base 1..2: mod_base = OTHER; note = phosphorothioate internucleotide linkage
  modified_base 2..3: mod_base = OTHER; note = phosphorothioate internucleotide linkage
  modified_base 19..20: mod_base = OTHER; note = phosphorothioate internucleotide linkage
  modified_base 20..21: mod_base = OTHER; note = phosphorothioate internucleotide linkage
acgacggcagtcccttctgtt

SEQ ID NO: 442 - RNA, 21 nt, Synthetic construct
  source 1..21: mol_type = other RNA
  misc_feature 1: note = monophosphate
  modified_base 1: mod_base = OTHER; note = 2'-O-methyl ribonucleotide
  modified_base 2: mod_base = OTHER; note = 2'-deoxy-2'-fluoro ribonucleotide
  modified_base 3: mod_base = OTHER; note = 2'-O-methyl ribonucleotide
  modified_base 4: mod_base = OTHER; note = 2'-deoxy-2'-fluoro ribonucleotide
  modified_base 5: mod_base = OTHER; note = 2'-O-methyl ribonucleotide
  modified_base 6..7: mod_base = OTHER; note = 2'-deoxy-2'-fluoro ribonucleotide
  modified_base 8..11: mod_base = OTHER; note = 2'-O-methyl ribonucleotide
  modified_base 12: mod_base = OTHER; note = 2'-deoxy-2'-fluoro ribonucleotide
  modified_base 13: mod_base = OTHER; note = 2'-O-methyl ribonucleotide
  modified_base 14: mod_base = OTHER; note = 2'-deoxy-2'-fluoro ribonucleotide
  modified_base 15..21: mod_base = OTHER; note = 2'-O-methyl ribonucleotide
  modified_base 1..2: mod_base = OTHER; note = phosphorothioate internucleotide linkage
  modified_base 2..3: mod_base = OTHER; note = phosphorothioate internucleotide linkage
  modified_base 19..20: mod_base = OTHER; note = phosphorothioate internucleotide linkage
  modified_base 20..21: mod_base = OTHER; note = phosphorothioate internucleotide linkage
cgcgacggcagtcccttcttt

SEQ ID NO: 443 - RNA, 21 nt, Synthetic construct
  source 1..21: mol_type = other RNA
  misc_feature 1: note = monophosphate
  modified_base 1: mod_base = OTHER; note = 2'-O-methyl ribonucleotide
  modified_base 2: mod_base = OTHER; note = 2'-deoxy-2'-fluoro ribonucleotide
  modified_base 3: mod_base = OTHER; note = 2'-O-methyl ribonucleotide
  modified_base 4: mod_base = OTHER; note = 2'-deoxy-2'-fluoro ribonucleotide
  modified_base 5: mod_base = OTHER; note = 2'-O-methyl ribonucleotide
  modified_base 6..7: mod_base = OTHER; note = 2'-deoxy-2'-fluoro ribonucleotide
  modified_base 8..11: mod_base = OTHER; note = 2'-O-methyl ribonucleotide
  modified_base 12: mod_base = OTHER; note = 2'-deoxy-2'-fluoro ribonucleotide
  modified_base 13: mod_base = OTHER; note = 2'-O-methyl ribonucleotide
  modified_base 14: mod_base = OTHER; note = 2'-deoxy-2'-fluoro ribonucleotide
  modified_base 15..21: mod_base = OTHER; note = 2'-O-methyl ribonucleotide
  modified_base 1..2: mod_base = OTHER; note = phosphorothioate internucleotide linkage
  modified_base 2..3: mod_base = OTHER; note = phosphorothioate internucleotide linkage
  modified_base 19..20: mod_base = OTHER; note = phosphorothioate internucleotide linkage
  modified_base 20..21: mod_base = OTHER; note = phosphorothioate internucleotide linkage
tgcgacggcagtcccttcttt

SEQ ID NO: 444 - RNA, 21 nt, Synthetic construct
  source 1..21: mol_type = other RNA
  misc_feature 1: note = monophosphate
  modified_base 1: mod_base = OTHER; note = 2'-O-methyl ribonucleotide
  modified_base 2: mod_base = OTHER; note = 2'-deoxy-2'-fluoro ribonucleotide
  modified_base 3: mod_base = OTHER; note = 2'-O-methyl ribonucleotide
  modified_base 4: mod_base = OTHER; note = 2'-deoxy-2'-fluoro ribonucleotide
  modified_base 5: mod_base = OTHER; note = 2'-O-methyl ribonucleotide
  modified_base 6..7: mod_base = OTHER; note = 2'-deoxy-2'-fluoro ribonucleotide
  modified_base 8..11: mod_base = OTHER; note = 2'-O-methyl ribonucleotide
  modified_base 12: mod_base = OTHER; note = 2'-deoxy-2'-fluoro ribonucleotide
  modified_base 13: mod_base = OTHER; note = 2'-O-methyl ribonucleotide
  modified_base 14: mod_base = OTHER; note = 2'-deoxy-2'-fluoro ribonucleotide
  modified_base 15..21: mod_base = OTHER; note = 2'-O-methyl ribonucleotide
  modified_base 1..2: mod_base = OTHER; note = phosphorothioate internucleotide linkage
  modified_base 2..3: mod_base = OTHER; note = phosphorothioate internucleotide linkage
  modified_base 19..20: mod_base = OTHER; note = phosphorothioate internucleotide linkage
  modified_base 20..21: mod_base = OTHER; note = phosphorothioate internucleotide linkage
atgcttgttcggaaggagctt

SEQ ID NO: 445 - RNA, 21 nt, Synthetic construct
  source 1..21: mol_type = other RNA
  misc_feature 1: note = monophosphate
  modified_base 1: mod_base = OTHER; note = 2'-O-methyl ribonucleotide
  modified_base 2: mod_base = OTHER; note = 2'-deoxy-2'-fluoro ribonucleotide
  modified_base 3: mod_base = OTHER; note = 2'-O-methyl ribonucleotide
  modified_base 4: mod_base = OTHER; note = 2'-deoxy-2'-fluoro ribonucleotide
  modified_base 5: mod_base = OTHER; note = 2'-O-methyl ribonucleotide
  modified_base 6..7: mod_base = OTHER; note = 2'-deoxy-2'-fluoro ribonucleotide
  modified_base 8..11: mod_base = OTHER; note = 2'-O-methyl ribonucleotide
  modified_base 12: mod_base = OTHER; note = 2'-deoxy-2'-fluoro ribonucleotide
  modified_base 13: mod_base = OTHER; note = 2'-O-methyl ribonucleotide
  modified_base 14: mod_base = OTHER; note = 2'-deoxy-2'-fluoro ribonucleotide
  modified_base 15..21: mod_base = OTHER; note = 2'-O-methyl ribonucleotide
  modified_base 1..2: mod_base = OTHER; note = phosphorothioate internucleotide linkage
  modified_base 2..3: mod_base = OTHER; note = phosphorothioate internucleotide linkage
  modified_base 19..20: mod_base = OTHER; note = phosphorothioate internucleotide linkage
  modified_base 20..21: mod_base = OTHER; note = phosphorothioate internucleotide linkage
agtgcttgttcggaaggagtt

SEQ ID NO: 446 - RNA, 21 nt, Synthetic construct
  source 1..21: mol_type = other RNA
  misc_feature 1: note = monophosphate
  modified_base 1: mod_base = OTHER; note = 2'-O-methyl ribonucleotide
  modified_base 2: mod_base = OTHER; note = 2'-deoxy-2'-fluoro ribonucleotide
  modified_base 3: mod_base = OTHER; note = 2'-O-methyl ribonucleotide
  modified_base 4: mod_base = OTHER; note = 2'-deoxy-2'-fluoro ribonucleotide
  modified_base 5: mod_base = OTHER; note = 2'-O-methyl ribonucleotide
  modified_base 6..7: mod_base = OTHER; note = 2'-deoxy-2'-fluoro ribonucleotide
  modified_base 8..11: mod_base = OTHER; note = 2'-O-methyl ribonucleotide
  modified_base 12: mod_base = OTHER; note = 2'-deoxy-2'-fluoro ribonucleotide
  modified_base 13: mod_base = OTHER; note = 2'-O-methyl ribonucleotide
  modified_base 14: mod_base = OTHER; note = 2'-deoxy-2'-fluoro ribonucleotide
  modified_base 15..21: mod_base = OTHER; note = 2'-O-methyl ribonucleotide
  modified_base 1..2: mod_base = OTHER; note = phosphorothioate internucleotide linkage
  modified_base 2..3: mod_base = OTHER; note = phosphorothioate internucleotide linkage
  modified_base 19..20: mod_base = OTHER; note = phosphorothioate internucleotide linkage
  modified_base 20..21: mod_base = OTHER; note = phosphorothioate internucleotide linkage
gtcggtgcttgttcggaagtt

SEQ ID NO: 447 - RNA, 21 nt, Synthetic construct
  source 1..21: mol_type = other RNA
  misc_feature 1: note = monophosphate
  modified_base 1: mod_base = OTHER; note = 2'-O-methyl ribonucleotide
  modified_base 2: mod_base = OTHER; note = 2'-deoxy-2'-fluoro ribonucleotide
  modified_base 3: mod_base = OTHER; note = 2'-O-methyl ribonucleotide
  modified_base 4: mod_base = OTHER; note = 2'-deoxy-2'-fluoro ribonucleotide
  modified_base 5: mod_base = OTHER; note = 2'-O-methyl ribonucleotide
  modified_base 6..7: mod_base = OTHER; note = 2'-deoxy-2'-fluoro ribonucleotide
  modified_base 8..11: mod_base = OTHER; note = 2'-O-methyl ribonucleotide
  modified_base 12: mod_base = OTHER; note = 2'-deoxy-2'-fluoro ribonucleotide
  modified_base 13: mod_base = OTHER; note = 2'-O-methyl ribonucleotide
  modified_base 14: mod_base = OTHER; note = 2'-deoxy-2'-fluoro ribonucleotide
  modified_base 15..21: mod_base = OTHER; note = 2'-O-methyl ribonucleotide
  modified_base 1..2: mod_base = OTHER; note = phosphorothioate internucleotide linkage
  modified_base 2..3: mod_base = OTHER; note = phosphorothioate internucleotide linkage
  modified_base 19..20: mod_base = OTHER; note = phosphorothioate internucleotide linkage
  modified_base 20..21: mod_base = OTHER; note = phosphorothioate internucleotide linkage
atcggtgcttgttcggaagtt

SEQ ID NO: 448 - RNA, 21 nt, Synthetic construct
  source 1..21: mol_type = other RNA
  misc_feature 1: note = monophosphate
  modified_base 1: mod_base = OTHER; note = 2'-O-methyl ribonucleotide
  modified_base 2: mod_base = OTHER; note = 2'-deoxy-2'-fluoro ribonucleotide
  modified_base 3: mod_base = OTHER; note = 2'-O-methyl ribonucleotide
  modified_base 4: mod_base = OTHER; note = 2'-deoxy-2'-fluoro ribonucleotide
  modified_base 5: mod_base = OTHER; note = 2'-O-methyl ribonucleotide
  modified_base 6..7: mod_base = OTHER; note = 2'-deoxy-2'-fluoro ribonucleotide
  modified_base 8..11: mod_base = OTHER; note = 2'-O-methyl ribonucleotide
  modified_base 12: mod_base = OTHER; note = 2'-deoxy-2'-fluoro ribonucleotide
  modified_base 13: mod_base = OTHER; note = 2'-O-methyl ribonucleotide
  modified_base 14: mod_base = OTHER; note = 2'-deoxy-2'-fluoro ribonucleotide
  modified_base 15..21: mod_base = OTHER; note = 2'-O-methyl ribonucleotide
  modified_base 1..2: mod_base = OTHER; note = phosphorothioate internucleotide linkage
  modified_base 2..3: mod_base = OTHER; note = phosphorothioate internucleotide linkage
  modified_base 19..20: mod_base = OTHER; note = phosphorothioate internucleotide linkage
  modified_base 20..21: mod_base = OTHER; note = phosphorothioate internucleotide linkage
agtcggtgcttgttcggaatt

SEQ ID NO: 449 - RNA, 23 nt, Synthetic construct
  source 1..23: mol_type = other RNA
  misc_feature 1: note = monophosphate
  modified_base 1: mod_base = OTHER; note = 2'-O-methyl ribonucleotide
  modified_base 2: mod_base = OTHER; note = 2'-deoxy-2'-fluoro ribonucleotide
  modified_base 3: mod_base = OTHER; note = 2'-O-methyl ribonucleotide
  modified_base 4: mod_base = OTHER; note = 2'-deoxy-2'-fluoro ribonucleotide
  modified_base 5: mod_base = OTHER; note = 2'-O-methyl ribonucleotide
  modified_base 6..7: mod_base = OTHER; note = 2'-deoxy-2'-fluoro ribonucleotide
  modified_base 8..11: mod_base = OTHER; note = 2'-O-methyl ribonucleotide
  modified_base 12: mod_base = OTHER; note = 2'-deoxy-2'-fluoro ribonucleotide
  modified_base 13: mod_base = OTHER; note = 2'-O-methyl ribonucleotide
  modified_base 14: mod_base = OTHER; note = 2'-deoxy-2'-fluoro ribonucleotide
  modified_base 15: mod_base = OTHER; note = 2'-O-methyl ribonucleotide
  modified_base 16: mod_base = OTHER; note = 2'-deoxy-2'-fluoro ribonucleotide
  modified_base 17: mod_base = OTHER; note = 2'-O-methyl ribonucleotide
  modified_base 18: mod_base = OTHER; note = 2'-deoxy-2'-fluoro ribonucleotide
  modified_base 19: mod_base = OTHER; note = 2'-O-methyl ribonucleotide
  modified_base 20: mod_base = OTHER; note = 2'-deoxy-2'-fluoro ribonucleotide
  modified_base 21: mod_base = OTHER; note = 2'-O-methyl ribonucleotide
  modified_base 22: mod_base = OTHER; note = 2'-deoxy-2'-fluoro ribonucleotide
  modified_base 23: mod_base = OTHER; note = 2'-O-methyl ribonucleotide
  modified_base 1..2: mod_base = OTHER; note = phosphorothioate internucleotide linkage
  modified_base 2..3: mod_base = OTHER; note = phosphorothioate internucleotide linkage
  modified_base 21..22: mod_base = OTHER; note = phosphorothioate internucleotide linkage
  modified_base 22..23: mod_base = OTHER; note = phosphorothioate internucleotide linkage
agtcggtgcttgttcggaaggtt

SEQ ID NO: 450 - RNA, 23 nt, Synthetic construct
  source 1..23: mol_type = other RNA
  misc_feature 1: note = monophosphate
  modified_base 1: mod_base = OTHER; note = 2'-O-methyl ribonucleotide
  modified_base 2: mod_base = OTHER; note = 2'-deoxy-2'-fluoro ribonucleotide
  modified_base 3: mod_base = OTHER; note = 2'-O-methyl ribonucleotide
  modified_base 4: mod_base = OTHER; note = 2'-deoxy-2'-fluoro ribonucleotide
  modified_base 5: mod_base = OTHER; note = 2'-O-methyl ribonucleotide
  modified_base 6..7: mod_base = OTHER; note = 2'-deoxy-2'-fluoro ribonucleotide
  modified_base 8..11: mod_base = OTHER; note = 2'-O-methyl ribonucleotide
  modified_base 12: mod_base = OTHER; note = 2'-deoxy-2'-fluoro ribonucleotide
  modified_base 13: mod_base = OTHER; note = 2'-O-methyl ribonucleotide
  modified_base 14: mod_base = OTHER; note = 2'-deoxy-2'-fluoro ribonucleotide
  modified_base 15..23: mod_base = OTHER; note = 2'-O-methyl ribonucleotide
  modified_base 1..2: mod_base = OTHER; note = phosphorothioate internucleotide linkage
  modified_base 2..3: mod_base = OTHER; note = phosphorothioate internucleotide linkage
  modified_base 21..22: mod_base = OTHER; note = phosphorothioate internucleotide linkage
  modified_base 22..23: mod_base = OTHER; note = phosphorothioate internucleotide linkage
agtcggtgcttgttcggaaggtt

SEQ ID NO: 451 - RNA, 21 nt, Synthetic construct
  source 1..21: mol_type = other RNA
  misc_feature 1: note = monophosphate
  modified_base 1: mod_base = OTHER; note = 2'-O-methyl ribonucleotide
  modified_base 2: mod_base = OTHER; note = 2'-deoxy-2'-fluoro ribonucleotide
  modified_base 3: mod_base = OTHER; note = 2'-O-methyl ribonucleotide
  modified_base 4: mod_base = OTHER; note = 2'-deoxy-2'-fluoro ribonucleotide
  modified_base 5: mod_base = OTHER; note = 2'-O-methyl ribonucleotide
  modified_base 6..7: mod_base = OTHER; note = 2'-deoxy-2'-fluoro ribonucleotide
  modified_base 8..11: mod_base = OTHER; note = 2'-O-methyl ribonucleotide
  modified_base 12: mod_base = OTHER; note = 2'-deoxy-2'-fluoro ribonucleotide
  modified_base 13: mod_base = OTHER; note = 2'-O-methyl ribonucleotide
  modified_base 14: mod_base = OTHER; note = 2'-deoxy-2'-fluoro ribonucleotide
  modified_base 15..21: mod_base = OTHER; note = 2'-O-methyl ribonucleotide
  modified_base 1..2: mod_base = OTHER; note = phosphorothioate internucleotide linkage
  modified_base 2..3: mod_base = OTHER; note = phosphorothioate internucleotide linkage
  modified_base 19..20: mod_base = OTHER; note = phosphorothioate internucleotide linkage
  modified_base 20..21: mod_base = OTHER; note = phosphorothioate internucleotide linkage
tagtcggtgcttgttcggatt

SEQ ID NO: 452 - RNA, 21 nt, Synthetic construct
  source 1..21: mol_type = other RNA
  misc_feature 1: note = monophosphate
  modified_base 1: mod_base = OTHER; note = 2'-O-methyl ribonucleotide
  modified_base 2: mod_base = OTHER; note = 2'-deoxy-2'-fluoro ribonucleotide
  modified_base 3: mod_base = OTHER; note = 2'-O-methyl ribonucleotide
  modified_base 4: mod_base = OTHER; note = 2'-deoxy-2'-fluoro ribonucleotide
  modified_base 5: mod_base = OTHER; note = 2'-O-methyl ribonucleotide
  modified_base 6..7: mod_base = OTHER; note = 2'-deoxy-2'-fluoro ribonucleotide
  modified_base 8..11: mod_base = OTHER; note = 2'-O-methyl ribonucleotide
  modified_base 12: mod_base = OTHER; note = 2'-deoxy-2'-fluoro ribonucleotide
  modified_base 13: mod_base = OTHER; note = 2'-O-methyl ribonucleotide
  modified_base 14: mod_base = OTHER; note = 2'-deoxy-2'-fluoro ribonucleotide
  modified_base 15..21: mod_base = OTHER; note = 2'-O-methyl ribonucleotide
  modified_base 1..2: mod_base = OTHER; note = phosphorothioate internucleotide linkage
  modified_base 2..3: mod_base = OTHER; note = phosphorothioate internucleotide linkage
  modified_base 19..20: mod_base = OTHER; note = phosphorothioate internucleotide linkage
  modified_base 20..21: mod_base = OTHER; note = phosphorothioate internucleotide linkage
ctcagtcggtgcttgttcgtt

SEQ ID NO: 453 - RNA, 21 nt, Synthetic construct
  source 1..21: mol_type = other RNA
  misc_feature 1: note = monophosphate
  modified_base 1: mod_base = OTHER; note = 2'-O-methyl ribonucleotide
  modified_base 2: mod_base = OTHER; note = 2'-deoxy-2'-fluoro ribonucleotide
  modified_base 3: mod_base = OTHER; note = 2'-O-methyl ribonucleotide
  modified_base 4: mod_base = OTHER; note = 2'-deoxy-2'-fluoro ribonucleotide
  modified_base 5: mod_base = OTHER; note = 2'-O-methyl ribonucleotide
  modified_base 6..7: mod_base = OTHER; note = 2'-deoxy-2'-fluoro ribonucleotide
  modified_base 8..11: mod_base = OTHER; note = 2'-O-methyl ribonucleotide
  modified_base 12: mod_base = OTHER; note = 2'-deoxy-2'-fluoro ribonucleotide
  modified_base 13: mod_base = OTHER; note = 2'-O-methyl ribonucleotide
  modified_base 14: mod_base = OTHER; note = 2'-deoxy-2'-fluoro ribonucleotide
  modified_base 15..21: mod_base = OTHER; note = 2'-O-methyl ribonucleotide
  modified_base 1..2: mod_base = OTHER; note = phosphorothioate internucleotide linkage
  modified_base 2..3: mod_base = OTHER; note = phosphorothioate internucleotide linkage
  modified_base 19..20: mod_base = OTHER; note = phosphorothioate internucleotide linkage
  modified_base 20..21: mod_base = OTHER; note = phosphorothioate internucleotide linkage
tctttgctcagtcggtgcttt

SEQ ID NO: 454 - RNA, 21 nt, Synthetic construct
  source 1..21: mol_type = other RNA
  misc_feature 1: note = monophosphate
  modified_base 1: mod_base = OTHER; note = 2'-O-methyl ribonucleotide
  modified_base 2: mod_base = OTHER; note = 2'-deoxy-2'-fluoro ribonucleotide
  modified_base 3: mod_base = OTHER; note = 2'-O-methyl ribonucleotide
  modified_base 4: mod_base = OTHER; note = 2'-deoxy-2'-fluoro ribonucleotide
  modified_base 5: mod_base = OTHER; note = 2'-O-methyl ribonucleotide
  modified_base 6..7: mod_base = OTHER; note = 2'-deoxy-2'-fluoro ribonucleotide
  modified_base 8..11: mod_base = OTHER; note = 2'-O-methyl ribonucleotide
  modified_base 12: mod_base = OTHER; note = 2'-deoxy-2'-fluoro ribonucleotide
  modified_base 13: mod_base = OTHER; note = 2'-O-methyl ribonucleotide
  modified_base 14: mod_base = OTHER; note = 2'-deoxy-2'-fluoro ribonucleotide
  modified_base 15..21: mod_base = OTHER; note = 2'-O-methyl ribonucleotide
  modified_base 1..2: mod_base = OTHER; note = phosphorothioate internucleotide linkage
  modified_base 2..3: mod_base = OTHER; note = phosphorothioate internucleotide linkage
  modified_base 19..20: mod_base = OTHER; note = phosphorothioate internucleotide linkage
  modified_base 20..21: mod_base = OTHER; note = phosphorothioate internucleotide linkage
acctttgctcagtcggtgctt

SEQ ID NO: 455 - RNA, 21 nt, Synthetic construct
  source 1..21: mol_type = other RNA
  misc_feature 1: note = monophosphate
  modified_base 1: mod_base = OTHER; note = 2'-O-methyl ribonucleotide
  modified_base 2: mod_base = OTHER; note = 2'-deoxy-2'-fluoro ribonucleotide
  modified_base 3: mod_base = OTHER; note = 2'-O-methyl ribonucleotide
  modified_base 4: mod_base = OTHER; note = 2'-deoxy-2'-fluoro ribonucleotide
  modified_base 5: mod_base = OTHER; note = 2'-O-methyl ribonucleotide
  modified_base 6..7: mod_base = OTHER; note = 2'-deoxy-2'-fluoro ribonucleotide
  modified_base 8..11: mod_base = OTHER; note = 2'-O-methyl ribonucleotide
  modified_base 12: mod_base = OTHER; note = 2'-deoxy-2'-fluoro ribonucleotide
  modified_base 13: mod_base = OTHER; note = 2'-O-methyl ribonucleotide
  modified_base 14: mod_base = OTHER; note = 2'-deoxy-2'-fluoro ribonucleotide
  modified_base 15..21: mod_base = OTHER; note = 2'-O-methyl ribonucleotide
  modified_base 1..2: mod_base = OTHER; note = phosphorothioate internucleotide linkage
  modified_base 2..3: mod_base = OTHER; note = phosphorothioate internucleotide linkage
  modified_base 19..20: mod_base = OTHER; note = phosphorothioate internucleotide linkage
  modified_base 20..21: mod_base = OTHER; note = phosphorothioate internucleotide linkage
ggcctttgctcagtcggtgtt

SEQ ID NO: 456 - RNA, 21 nt, Synthetic construct
  source 1..21: mol_type = other RNA
  misc_feature 1: note = monophosphate
  modified_base 1: mod_base = OTHER; note = 2'-O-methyl ribonucleotide
  modified_base 2: mod_base = OTHER; note = 2'-deoxy-2'-fluoro ribonucleotide
  modified_base 3: mod_base = OTHER; note = 2'-O-methyl ribonucleotide
  modified_base 4: mod_base = OTHER; note = 2'-deoxy-2'-fluoro ribonucleotide
  modified_base 5: mod_base = OTHER; note = 2'-O-methyl ribonucleotide
  modified_base 6..7: mod_base = OTHER; note = 2'-deoxy-2'-fluoro ribonucleotide
  modified_base 8..11: mod_base = OTHER; note = 2'-O-methyl ribonucleotide
  modified_base 12: mod_base = OTHER; note = 2'-deoxy-2'-fluoro ribonucleotide
  modified_base 13: mod_base = OTHER; note = 2'-O-methyl ribonucleotide
  modified_base 14: mod_base = OTHER; note = 2'-deoxy-2'-fluoro ribonucleotide
  modified_base 15..21: mod_base = OTHER; note = 2'-O-methyl ribonucleotide
  modified_base 1..2: mod_base = OTHER; note = phosphorothioate internucleotide linkage
  modified_base 2..3: mod_base = OTHER; note = phosphorothioate internucleotide linkage
  modified_base 19..20: mod_base = OTHER; note = phosphorothioate internucleotide linkage
  modified_base 20..21: mod_base = OTHER; note = phosphorothioate internucleotide linkage
ttcctgcaccccaggcctttt

SEQ ID NO: 457 - RNA, 21 nt, Synthetic construct
  source 1..21: mol_type = other RNA
  misc_feature 1: note = monophosphate
  modified_base 1: mod_base = OTHER; note = 2'-O-methyl ribonucleotide
  modified_base 2: mod_base = OTHER; note = 2'-deoxy-2'-fluoro ribonucleotide
  modified_base 3: mod_base = OTHER; note = 2'-O-methyl ribonucleotide
  modified_base 4: mod_base = OTHER; note = 2'-deoxy-2'-fluoro ribonucleotide
  modified_base 5: mod_base = OTHER; note = 2'-O-methyl ribonucleotide
  modified_base 6..7: mod_base = OTHER; note = 2'-deoxy-2'-fluoro ribonucleotide
  modified_base 8..11: mod_base = OTHER; note = 2'-O-methyl ribonucleotide
  modified_base 12: mod_base = OTHER; note = 2'-deoxy-2'-fluoro ribonucleotide
  modified_base 13: mod_base = OTHER; note = 2'-O-methyl ribonucleotide
  modified_base 14: mod_base = OTHER; note = 2'-deoxy-2'-fluoro ribonucleotide
  modified_base 15..21: mod_base = OTHER; note = 2'-O-methyl ribonucleotide
  modified_base 1..2: mod_base = OTHER; note = phosphorothioate internucleotide linkage
  modified_base 2..3: mod_base = OTHER; note = phosphorothioate internucleotide linkage
  modified_base 19..20: mod_base = OTHER; note = phosphorothioate internucleotide linkage
  modified_base 20..21: mod_base = OTHER; note = phosphorothioate internucleotide linkage
tagcactcctgcaccccagtt

SEQ ID NO: 458 - RNA, 21 nt, Synthetic construct
  source 1..21: mol_type = other RNA
  modified_base 1: mod_base = OTHER; note = 2'-O-methyl ribonucleotide
  modified_base 2: mod_base = OTHER; note = 2'-deoxy-2'-fluoro ribonucleotide
  modified_base 3..6: mod_base = OTHER; note = 2'-O-methyl ribonucleotide
  modified_base 7: mod_base = OTHER; note = 2'-deoxy-2'-fluoro ribonucleotide
  modified_base 8..11: mod_base = OTHER; note = 2'-O-methyl ribonucleotide
  modified_base 12: mod_base = OTHER; note = 2'-deoxy-2'-fluoro ribonucleotide
  modified_base 13: mod_base = OTHER; note = 2'-O-methyl ribonucleotide
  modified_base 14: mod_base = OTHER; note = 2'-deoxy-2'-fluoro ribonucleotide
  modified_base 15..21: mod_base = OTHER; note = 2'-O-methyl ribonucleotide
  modified_base 1..2: mod_base = OTHER; note = phosphorothioate internucleotide linkage
  modified_base 2..3: mod_base = OTHER; note = phosphorothioate internucleotide linkage
  modified_base 19..20: mod_base = OTHER; note = phosphorothioate internucleotide linkage
  modified_base 20..21: mod_base = OTHER; note = phosphorothioate internucleotide linkage
tagcactcctgcaccccagtt

SEQ ID NO: 459 - RNA, 21 nt, Synthetic construct
  source 1..21: mol_type = other RNA
  misc_feature 1: note = monophosphate
  modified_base 1: mod_base = OTHER; note = 2'-O-methyl ribonucleotide
  modified_base 2: mod_base = OTHER; note = 2'-deoxy-2'-fluoro ribonucleotide
  modified_base 3: mod_base = OTHER; note = 2'-O-methyl ribonucleotide
  modified_base 4: mod_base = OTHER; note = 2'-deoxy-2'-fluoro ribonucleotide
  modified_base 5: mod_base = OTHER; note = 2'-O-methyl ribonucleotide
  modified_base 6..7: mod_base = OTHER; note = 2'-deoxy-2'-fluoro ribonucleotide
  modified_base 8..11: mod_base = OTHER; note = 2'-O-methyl ribonucleotide
  modified_base 12: mod_base = OTHER; note = 2'-deoxy-2'-fluoro ribonucleotide
  modified_base 13: mod_base = OTHER; note = 2'-O-methyl ribonucleotide
  modified_base 14: mod_base = OTHER; note = 2'-deoxy-2'-fluoro ribonucleotide
  modified_base 15..21: mod_base = OTHER; note = 2'-O-methyl ribonucleotide
  modified_base 1..2: mod_base = OTHER; note = phosphorothioate internucleotide linkage
  modified_base 2..3: mod_base = OTHER; note = phosphorothioate internucleotide linkage
  modified_base 19..20: mod_base = OTHER; note = phosphorothioate internucleotide linkage
  modified_base 20..21: mod_base = OTHER; note = phosphorothioate internucleotide linkage
ggtagcactcctgcacccctt

SEQ ID NO: 460 - RNA, 21 nt, Synthetic construct
  source 1..21: mol_type = other RNA
  misc_feature 1: note = monophosphate
  modified_base 1: mod_base = OTHER; note = 2'-O-methyl ribonucleotide
  modified_base 2: mod_base = OTHER; note = 2'-deoxy-2'-fluoro ribonucleotide
  modified_base 3: mod_base = OTHER; note = 2'-O-methyl ribonucleotide
  modified_base 4: mod_base = OTHER; note = 2'-deoxy-2'-fluoro ribonucleotide
  modified_base 5: mod_base = OTHER; note = 2'-O-methyl ribonucleotide
  modified_base 6..7: mod_base = OTHER; note = 2'-deoxy-2'-fluoro ribonucleotide
  modified_base 8..11: mod_base = OTHER; note = 2'-O-methyl ribonucleotide
  modified_base 12: mod_base = OTHER; note = 2'-deoxy-2'-fluoro ribonucleotide
  modified_base 13: mod_base = OTHER; note = 2'-O-methyl ribonucleotide
  modified_base 14: mod_base = OTHER; note = 2'-deoxy-2'-fluoro ribonucleotide
  modified_base 15..21: mod_base = OTHER; note = 2'-O-methyl ribonucleotide
  modified_base 1..2: mod_base = OTHER; note = phosphorothioate internucleotide linkage
  modified_base 2..3: mod_base = OTHER; note = phosphorothioate internucleotide linkage
  modified_base 19..20: mod_base = OTHER; note = phosphorothioate internucleotide linkage
  modified_base 20..21: mod_base = OTHER; note = phosphorothioate internucleotide linkage
tgccacaggatctggattctt

SEQ ID NO: 461 - RNA, 21 nt, Synthetic construct
  source 1..21: mol_type = other RNA
  misc_feature 1: note = monophosphate
  modified_base 1: mod_base = OTHER; note = 2'-O-methyl ribonucleotide
  modified_base 2: mod_base = OTHER; note = 2'-deoxy-2'-fluoro ribonucleotide
  modified_base 3: mod_base = OTHER; note = 2'-O-methyl ribonucleotide
  modified_base 4: mod_base = OTHER; note = 2'-deoxy-2'-fluoro ribonucleotide
  modified_base 5: mod_base = OTHER; note = 2'-O-methyl ribonucleotide
  modified_base 6..7: mod_base = OTHER; note = 2'-deoxy-2'-fluoro ribonucleotide
  modified_base 8..11: mod_base = OTHER; note = 2'-O-methyl ribonucleotide
  modified_base 12: mod_base = OTHER; note = 2'-deoxy-2'-fluoro ribonucleotide
  modified_base 13: mod_base = OTHER; note = 2'-O-methyl ribonucleotide
  modified_base 14: mod_base = OTHER; note = 2'-deoxy-2'-fluoro ribonucleotide
  modified_base 15..21: mod_base = OTHER; note = 2'-O-methyl ribonucleotide
  modified_base 1..2: mod_base = OTHER; note = phosphorothioate internucleotide linkage
  modified_base 2..3: mod_base = OTHER; note = phosphorothioate internucleotide linkage
  modified_base 19..20: mod_base = OTHER; note = phosphorothioate internucleotide linkage
  modified_base 20..21: mod_base = OTHER; note = phosphorothioate internucleotide linkage
aataaggggctgccacaggtt

SEQ ID NO: 462 - RNA, 21 nt, Synthetic construct
  source 1..21: mol_type = other RNA
  misc_feature 1: note = monophosphate
  modified_base 1: mod_base = OTHER; note = 2'-O-methyl ribonucleotide
  modified_base 2: mod_base = OTHER; note = 2'-deoxy-2'-fluoro ribonucleotide
  modified_base 3: mod_base = OTHER; note = 2'-O-methyl ribonucleotide
  modified_base 4: mod_base = OTHER; note = 2'-deoxy-2'-fluoro ribonucleotide
  modified_base 5: mod_base = OTHER; note = 2'-O-methyl ribonucleotide
  modified_base 6..7: mod_base = OTHER; note = 2'-deoxy-2'-fluoro ribonucleotide
  modified_base 8..11: mod_base = OTHER; note = 2'-O-methyl ribonucleotide
  modified_base 12: mod_base = OTHER; note = 2'-deoxy-2'-fluoro ribonucleotide
  modified_base 13: mod_base = OTHER; note = 2'-O-methyl ribonucleotide
  modified_base 14: mod_base = OTHER; note = 2'-deoxy-2'-fluoro ribonucleotide
  modified_base 15..21: mod_base = OTHER; note = 2'-O-methyl ribonucleotide
  modified_base 1..2: mod_base = OTHER; note = phosphorothioate internucleotide linkage
  modified_base 2..3: mod_base = OTHER; note = phosphorothioate internucleotide linkage
  modified_base 19..20: mod_base = OTHER; note = phosphorothioate internucleotide linkage
  modified_base 20..21: mod_base = OTHER; note = phosphorothioate internucleotide linkage
ataacaataaggggctgcctt

SEQ ID NO: 463 - RNA, 21 nt, Synthetic construct
  source 1..21: mol_type = other RNA
  misc_feature 1: note = monophosphate
  modified_base 1: mod_base = OTHER; note = 2'-O-methyl ribonucleotide
  modified_base 2: mod_base = OTHER; note = 2'-deoxy-2'-fluoro ribonucleotide
  modified_base 3: mod_base = OTHER; note = 2'-O-methyl ribonucleotide
  modified_base 4: mod_base = OTHER; note = 2'-deoxy-2'-fluoro ribonucleotide
  modified_base 5: mod_base = OTHER; note = 2'-O-methyl ribonucleotide
  modified_base 6..7: mod_base = OTHER; note = 2'-deoxy-2'-fluoro ribonucleotide
  modified_base 8..11: mod_base = OTHER; note = 2'-O-methyl ribonucleotide
  modified_base 12: mod_base = OTHER; note = 2'-deoxy-2'-fluoro ribonucleotide
  modified_base 13: mod_base = OTHER; note = 2'-O-methyl ribonucleotide
  modified_base 14: mod_base = OTHER; note = 2'-deoxy-2'-fluoro ribonucleotide
  modified_base 15: mod_base = OTHER; note = 2'-O-methyl ribonucleotide
  modified_base 16: mod_base = OTHER; note = 2'-deoxy-2'-fluoro ribonucleotide
  modified_base 17: mod_base = OTHER; note = 2'-O-methyl ribonucleotide
  modified_base 18: mod_base = OTHER; note = 2'-deoxy-2'-fluoro ribonucleotide
  modified_base 19: mod_base = OTHER; note = 2'-O-methyl ribonucleotide
  modified_base 20: mod_base = OTHER; note = 2'-deoxy-2'-fluoro ribonucleotide
  modified_base 21: mod_base = OTHER; note = 2'-O-methyl ribonucleotide
  modified_base 1..2: mod_base = OTHER; note = phosphorothioate internucleotide linkage
  modified_base 2..3: mod_base = OTHER; note = phosphorothioate internucleotide linkage
  modified_base 19..20: mod_base = OTHER; note = phosphorothioate internucleotide linkage
  modified_base 20..21: mod_base = OTHER; note = phosphorothioate internucleotide linkage
ataacaataaggggctgcctt

SEQ ID NO: 464 - RNA, 23 nt, Synthetic construct
  source 1..23: mol_type = other RNA
  misc_feature 1: note = monophosphate
  modified_base 1: mod_base = OTHER; note = 2'-O-methyl ribonucleotide
  modified_base 2: mod_base = OTHER; note = 2'-deoxy-2'-fluoro ribonucleotide
  modified_base 3: mod_base = OTHER; note = 2'-O-methyl ribonucleotide
  modified_base 4: mod_base = OTHER; note = 2'-deoxy-2'-fluoro ribonucleotide
  modified_base 5: mod_base = OTHER; note = 2'-O-methyl ribonucleotide
  modified_base 6..7: mod_base = OTHER; note = 2'-deoxy-2'-fluoro ribonucleotide
  modified_base 8..11: mod_base = OTHER; note = 2'-O-methyl ribonucleotide
  modified_base 12: mod_base = OTHER; note = 2'-deoxy-2'-fluoro ribonucleotide
  modified_base 13: mod_base = OTHER; note = 2'-O-methyl ribonucleotide
  modified_base 14: mod_base = OTHER; note = 2'-deoxy-2'-fluoro ribonucleotide
  modified_base 15..23: mod_base = OTHER; note = 2'-O-methyl ribonucleotide
  modified_base 1..2: mod_base = OTHER; note = phosphorothioate internucleotide linkage
  modified_base 2..3: mod_base = OTHER; note = phosphorothioate internucleotide linkage
  modified_base 21..22: mod_base = OTHER; note = phosphorothioate internucleotide linkage
  modified_base 22..23: mod_base = OTHER; note = phosphorothioate internucleotide linkage
ataacaataaggggctgccactt

SEQ ID NO: 465 - RNA, 23 nt, Synthetic construct
  source 1..23: mol_type = other RNA
  misc_feature 1: note = monophosphate
  modified_base 1: mod_base = OTHER; note = 2'-O-methyl ribonucleotide
  modified_base 2: mod_base = OTHER; note = 2'-deoxy-2'-fluoro ribonucleotide
  modified_base 3: mod_base = OTHER; note = 2'-O-methyl ribonucleotide
  modified_base 4: mod_base = OTHER; note = 2'-deoxy-2'-fluoro ribonucleotide
  modified_base 5: mod_base = OTHER; note = 2'-O-methyl ribonucleotide
  modified_base 6..7: mod_base = OTHER; note = 2'-deoxy-2'-fluoro ribonucleotide
  modified_base 8..11: mod_base = OTHER; note = 2'-O-methyl ribonucleotide
  modified_base 12: mod_base = OTHER; note = 2'-deoxy-2'-fluoro ribonucleotide
  modified_base 13: mod_base = OTHER; note = 2'-O-methyl ribonucleotide
  modified_base 14: mod_base = OTHER; note = 2'-deoxy-2'-fluoro ribonucleotide
  modified_base 15: mod_base = OTHER; note = 2'-O-methyl ribonucleotide
  modified_base 16: mod_base = OTHER; note = 2'-deoxy-2'-fluoro ribonucleotide
  modified_base 17: mod_base = OTHER; note = 2'-O-methyl ribonucleotide
  modified_base 18: mod_base = OTHER; note = 2'-deoxy-2'-fluoro ribonucleotide
  modified_base 19: mod_base = OTHER; note = 2'-O-methyl ribonucleotide
  modified_base 20: mod_base = OTHER; note = 2'-deoxy-2'-fluoro ribonucleotide
  modified_base 21: mod_base = OTHER; note = 2'-O-methyl ribonucleotide
  modified_base 22: mod_base = OTHER; note = 2'-deoxy-2'-fluoro ribonucleotide
  modified_base 23: mod_base = OTHER; note = 2'-O-methyl ribonucleotide
  modified_base 1..2: mod_base = OTHER; note = phosphorothioate internucleotide linkage
  modified_base 2..3: mod_base = OTHER; note = phosphorothioate internucleotide linkage
  modified_base 21..22: mod_base = OTHER; note = phosphorothioate internucleotide linkage
  modified_base 22..23: mod_base = OTHER; note = phosphorothioate internucleotide linkage
ataacaataaggggctgccactt

SEQ ID NO: 466 - RNA, 21 nt, Synthetic construct
  source 1..21: mol_type = other RNA
  misc_feature 1: note = monophosphate
  modified_base 1: mod_base = OTHER; note = 2'-O-methyl ribonucleotide
  modified_base 2: mod_base = OTHER; note = 2'-deoxy-2'-fluoro ribonucleotide
  modified_base 3: mod_base = OTHER; note = 2'-O-methyl ribonucleotide
  modified_base 4: mod_base = OTHER; note = 2'-deoxy-2'-fluoro ribonucleotide
  modified_base 5: mod_base = OTHER; note = 2'-O-methyl ribonucleotide
  modified_base 6..7: mod_base = OTHER; note = 2'-deoxy-2'-fluoro ribonucleotide
  modified_base 8..11: mod_base = OTHER; note = 2'-O-methyl ribonucleotide
  modified_base 12: mod_base = OTHER; note = 2'-deoxy-2'-fluoro ribonucleotide
  modified_base 13: mod_base = OTHER; note = 2'-O-methyl ribonucleotide
  modified_base 14: mod_base = OTHER; note = 2'-deoxy-2'-fluoro ribonucleotide
  modified_base 15..21: mod_base = OTHER; note = 2'-O-methyl ribonucleotide
  modified_base 1..2: mod_base = OTHER; note = phosphorothioate internucleotide linkage
  modified_base 2..3: mod_base = OTHER; note = phosphorothioate internucleotide linkage
  modified_base 19..20: mod_base = OTHER; note = phosphorothioate internucleotide linkage
  modified_base 20..21: mod_base = OTHER; note = phosphorothioate internucleotide linkage
tataacaataaggggctgctt

SEQ ID NO: 467 - RNA, 21 nt, Synthetic construct
  source 1..21: mol_type = other RNA
  misc_feature 1: note = monophosphate
  modified_base 1: mod_base = OTHER; note = 2'-O-methyl ribonucleotide
  modified_base 2: mod_base = OTHER; note = 2'-deoxy-2'-fluoro ribonucleotide
  modified_base 3: mod_base = OTHER; note = 2'-O-methyl ribonucleotide
  modified_base 4: mod_base = OTHER; note = 2'-deoxy-2'-fluoro ribonucleotide
  modified_base 5: mod_base = OTHER; note = 2'-O-methyl ribonucleotide
  modified_base 6..7: mod_base = OTHER; note = 2'-deoxy-2'-fluoro ribonucleotide
  modified_base 8..11: mod_base = OTHER; note = 2'-O-methyl ribonucleotide
  modified_base 12: mod_base = OTHER; note = 2'-deoxy-2'-fluoro ribonucleotide
  modified_base 13: mod_base = OTHER; note = 2'-O-methyl ribonucleotide
  modified_base 14: mod_base = OTHER; note = 2'-deoxy-2'-fluoro ribonucleotide
  modified_base 15..21: mod_base = OTHER; note = 2'-O-methyl ribonucleotide
  modified_base 1..2: mod_base = OTHER; note = phosphorothioate internucleotide linkage
  modified_base 2..3: mod_base = OTHER; note = phosphorothioate internucleotide linkage
  modified_base 19..20: mod_base = OTHER; note = phosphorothioate internucleotide linkage
  modified_base 20..21: mod_base = OTHER; note = phosphorothioate internucleotide linkage
cgtataacaataaggggcttt

SEQ ID NO: 468 - RNA, 21 nt, Synthetic construct
  source 1..21: mol_type = other RNA
  misc_feature 1: note = monophosphate
  modified_base 1: mod_base = OTHER; note = 2'-O-methyl ribonucleotide
  modified_base 2: mod_base = OTHER; note = 2'-deoxy-2'-fluoro ribonucleotide
  modified_base 3: mod_base = OTHER; note = 2'-O-methyl ribonucleotide
  modified_base 4: mod_base = OTHER; note = 2'-deoxy-2'-fluoro ribonucleotide
  modified_base 5: mod_base = OTHER; note = 2'-O-methyl ribonucleotide
  modified_base 6..7: mod_base = OTHER; note = 2'-deoxy-2'-fluoro ribonucleotide
  modified_base 8..11: mod_base = OTHER; note = 2'-O-methyl ribonucleotide
  modified_base 12: mod_base = OTHER; note = 2'-deoxy-2'-fluoro ribonucleotide
  modified_base 13: mod_base = OTHER; note = 2'-O-methyl ribonucleotide
  modified_base 14: mod_base = OTHER; note = 2'-deoxy-2'-fluoro ribonucleotide
  modified_base 15..21: mod_base = OTHER; note = 2'-O-methyl ribonucleotide
  modified_base 1..2: mod_base = OTHER; note = phosphorothioate internucleotide linkage
  modified_base 2..3: mod_base = OTHER; note = phosphorothioate internucleotide linkage
  modified_base 19..20: mod_base = OTHER; note = phosphorothioate internucleotide linkage
  modified_base 20..21: mod_base = OTHER; note = phosphorothioate internucleotide linkage
tgtataacaataaggggcttt

SEQ ID NO: 469 - RNA, 21 nt, Synthetic construct
  source 1..21: mol_type = other RNA
  misc_feature 1: note = monophosphate
  modified_base 1: mod_base = OTHER; note = 2'-O-methyl ribonucleotide
  modified_base 2: mod_base = OTHER; note = 2'-deoxy-2'-fluoro ribonucleotide
  modified_base 3: mod_base = OTHER; note = 2'-O-methyl ribonucleotide
  modified_base 4: mod_base = OTHER; note = 2'-deoxy-2'-fluoro ribonucleotide
  modified_base 5: mod_base = OTHER; note = 2'-O-methyl ribonucleotide
  modified_base 6..7: mod_base = OTHER; note = 2'-deoxy-2'-fluoro ribonucleotide
  modified_base 8..11: mod_base = OTHER; note = 2'-O-methyl ribonucleotide
  modified_base 12: mod_base = OTHER; note = 2'-deoxy-2'-fluoro ribonucleotide
  modified_base 13: mod_base = OTHER; note = 2'-O-methyl ribonucleotide
  modified_base 14: mod_base = OTHER; note = 2'-deoxy-2'-fluoro ribonucleotide
  modified_base 15..21: mod_base = OTHER; note = 2'-O-methyl ribonucleotide
  modified_base 1..2: mod_base = OTHER; note = phosphorothioate internucleotide linkage
  modified_base 2..3: mod_base = OTHER; note = phosphorothioate internucleotide linkage
  modified_base 19..20: mod_base = OTHER; note = phosphorothioate internucleotide linkage
  modified_base 20..21: mod_base = OTHER; note = phosphorothioate internucleotide linkage
tcgtataacaataaggggctt

SEQ ID NO: 470 - RNA, 23 nt, Synthetic construct
  source 1..23: mol_type = other RNA
  misc_feature 1: note = monophosphate
  modified_base 1: mod_base = OTHER; note = 2'-O-methyl ribonucleotide
  modified_base 2: mod_base = OTHER; note = 2'-deoxy-2'-fluoro ribonucleotide
  modified_base 3: mod_base = OTHER; note = 2'-O-methyl ribonucleotide
  modified_base 4: mod_base = OTHER; note = 2'-deoxy-2'-fluoro ribonucleotide
  modified_base 5: mod_base = OTHER; note = 2'-O-methyl ribonucleotide
  modified_base 6: mod_base = OTHER; note = 2'-deoxy-2'-fluoro ribonucleotide
  modified_base 7: mod_base = OTHER; note = 2'-O-methyl ribonucleotide
  modified_base 8..9: mod_base = OTHER; note = 2'-deoxy-2'-fluoro ribonucleotide
  modified_base 10..13: mod_base = OTHER; note = 2'-O-methyl ribonucleotide
  modified_base 14: mod_base = OTHER; note = 2'-deoxy-2'-fluoro ribonucleotide
  modified_base 15: mod_base = OTHER; note = 2'-O-methyl ribonucleotide
  modified_base 16: mod_base = OTHER; note = 2'-deoxy-2'-fluoro ribonucleotide
  modified_base 17..23: mod_base = OTHER; note = 2'-O-methyl ribonucleotide
  modified_base 1..2: mod_base = OTHER; note = phosphorothioate internucleotide linkage
  modified_base 2..3: mod_base = OTHER; note = phosphorothioate internucleotide linkage
  modified_base 21..22: mod_base = OTHER; note = phosphorothioate internucleotide linkage
  modified_base 22..23: mod_base = OTHER; note = phosphorothioate internucleotide linkage
tcgtataacaataaggggctgtt

SEQ ID NO: 471 - RNA, 21 nt, Synthetic construct
  source 1..21: mol_type = other RNA
  misc_feature 1: note = monophosphate
  modified_base 1: mod_base = OTHER; note = 2'-O-methyl ribonucleotide
  modified_base 2: mod_base = OTHER; note = 2'-deoxy-2'-fluoro ribonucleotide
  modified_base 3: mod_base = OTHER; note = 2'-O-methyl ribonucleotide
  modified_base 4: mod_base = OTHER; note = 2'-deoxy-2'-fluoro ribonucleotide
  modified_base 5: mod_base = OTHER; note = 2'-O-methyl ribonucleotide
  modified_base 6..7: mod_base = OTHER; note = 2'-deoxy-2'-fluoro ribonucleotide
  modified_base 8..11: mod_base = OTHER; note = 2'-O-methyl ribonucleotide
  modified_base 12: mod_base = OTHER; note = 2'-deoxy-2'-fluoro ribonucleotide
  modified_base 13: mod_base = OTHER; note = 2'-O-methyl ribonucleotide
  modified_base 14: mod_base = OTHER; note = 2'-deoxy-2'-fluoro ribonucleotide
  modified_base 15..21: mod_base = OTHER; note = 2'-O-methyl ribonucleotide
  modified_base 1..2: mod_base = OTHER; note = phosphorothioate internucleotide linkage
  modified_base 2..3: mod_base = OTHER; note = phosphorothioate internucleotide linkage
  modified_base 19..20: mod_base = OTHER; note = phosphorothioate internucleotide linkage
  modified_base 20..21: mod_base = OTHER; note = phosphorothioate internucleotide linkage
ctcgtataacaataaggggtt

SEQ ID NO: 472 - RNA, 23 nt, Synthetic construct
  source 1..23: mol_type = other RNA
  misc_feature 1: note = monophosphate
  modified_base 1: mod_base = OTHER; note = 2'-O-methyl ribonucleotide
  modified_base 2: mod_base = OTHER; note = 2'-deoxy-2'-fluoro ribonucleotide
  modified_base 3: mod_base = OTHER; note = 2'-O-methyl ribonucleotide
  modified_base 4: mod_base = OTHER; note = 2'-deoxy-2'-fluoro ribonucleotide
  modified_base 5: mod_base = OTHER; note = 2'-O-methyl ribonucleotide
  modified_base 6..7: mod_base = OTHER; note = 2'-deoxy-2'-fluoro ribonucleotide
  modified_base 8..11: mod_base = OTHER; note = 2'-O-methyl ribonucleotide
  modified_base 12: mod_base = OTHER; note = 2'-deoxy-2'-fluoro ribonucleotide
  modified_base 13: mod_base = OTHER; note = 2'-O-methyl ribonucleotide
  modified_base 14: mod_base = OTHER; note = 2'-deoxy-2'-fluoro ribonucleotide
  modified_base 15..23: mod_base = OTHER; note = 2'-O-methyl ribonucleotide
  modified_base 1..2: mod_base = OTHER; note = phosphorothioate internucleotide linkage
  modified_base 2..3: mod_base = OTHER; note = phosphorothioate internucleotide linkage
  modified_base 21..22: mod_base = OTHER; note = phosphorothioate internucleotide linkage
  modified_base 22..23: mod_base = OTHER; note = phosphorothioate internucleotide linkage
ctcgtataacaataaggggcttt

SEQ ID NO: 473 - RNA, 21 nt, Synthetic construct
  source 1..21: mol_type = other RNA
  misc_feature 1: note = monophosphate
  modified_base 1: mod_base = OTHER; note = 2'-O-methyl ribonucleotide
  modified_base 2: mod_base = OTHER; note = 2'-deoxy-2'-fluoro ribonucleotide
  modified_base 3: mod_base = OTHER; note = 2'-O-methyl ribonucleotide
  modified_base 4: mod_base = OTHER; note = 2'-deoxy-2'-fluoro ribonucleotide
  modified_base 5: mod_base = OTHER; note = 2'-O-methyl ribonucleotide
  modified_base 6..7: mod_base = OTHER; note = 2'-deoxy-2'-fluoro ribonucleotide
  modified_base 8..11: mod_base = OTHER; note = 2'-O-methyl ribonucleotide
  modified_base 12: mod_base = OTHER; note = 2'-deoxy-2'-fluoro ribonucleotide
  modified_base 13: mod_base = OTHER; note = 2'-O-methyl ribonucleotide
  modified_base 14: mod_base = OTHER; note = 2'-deoxy-2'-fluoro ribonucleotide
  modified_base 15..21: mod_base = OTHER; note = 2'-O-methyl ribonucleotide
  modified_base 1..2: mod_base = OTHER; note = phosphorothioate internucleotide linkage
  modified_base 2..3: mod_base = OTHER; note = phosphorothioate internucleotide linkage
  modified_base 19..20: mod_base = OTHER; note = phosphorothioate internucleotide linkage
  modified_base 20..21: mod_base = OTHER; note = phosphorothioate internucleotide linkage
ttcgtataacaataaggggtt

SEQ ID NO: 474 - RNA, 21 nt, Synthetic construct
  source 1..21: mol_type = other RNA
  misc_feature 1: note = monophosphate
  modified_base 1: mod_base = OTHER; note = 2'-O-methyl ribonucleotide
  modified_base 2: mod_base = OTHER; note = 2'-deoxy-2'-fluoro ribonucleotide
  modified_base 3: mod_base = OTHER; note = 2'-O-methyl ribonucleotide
  modified_base 4: mod_base = OTHER; note = 2'-deoxy-2'-fluoro ribonucleotide
  modified_base 5: mod_base = OTHER; note = 2'-O-methyl ribonucleotide
  modified_base 6..7: mod_base = OTHER; note = 2'-deoxy-2'-fluoro ribonucleotide
  modified_base 8..11: mod_base = OTHER; note = 2'-O-methyl ribonucleotide
  modified_base 12: mod_base = OTHER; note = 2'-deoxy-2'-fluoro ribonucleotide
  modified_base 13: mod_base = OTHER; note = 2'-O-methyl ribonucleotide
  modified_base 14: mod_base = OTHER; note = 2'-deoxy-2'-fluoro ribonucleotide
  modified_base 15..21: mod_base = OTHER; note = 2'-O-methyl ribonucleotide
  modified_base 1..2: mod_base = OTHER; note = phosphorothioate internucleotide linkage
  modified_base 2..3: mod_base = OTHER; note = phosphorothioate internucleotide linkage
  modified_base 19..20: mod_base = OTHER; note = phosphorothioate internucleotide linkage
  modified_base 20..21: mod_base = OTHER; note = phosphorothioate internucleotide linkage
cgtctgagcattgtgtcagtt

SEQ ID NO: 475 - RNA, 21 nt, Synthetic construct
  source 1..21: mol_type = other RNA
  misc_feature 1: note = monophosphate
  modified_base 1: mod_base = OTHER; note = 2'-O-methyl ribonucleotide
  modified_base 2: mod_base = OTHER; note = 2'-deoxy-2'-fluoro ribonucleotide
  modified_base 3: mod_base = OTHER; note = 2'-O-methyl ribonucleotide
  modified_base 4: mod_base = OTHER; note = 2'-deoxy-2'-fluoro ribonucleotide
  modified_base 5: mod_base = OTHER; note = 2'-O-methyl ribonucleotide
  modified_base 6..7: mod_base = OTHER; note = 2'-deoxy-2'-fluoro ribonucleotide
  modified_base 8..11: mod_base = OTHER; note = 2'-O-methyl ribonucleotide
  modified_base 12: mod_base = OTHER; note = 2'-deoxy-2'-fluoro ribonucleotide
  modified_base 13: mod_base = OTHER; note = 2'-O-methyl ribonucleotide
  modified_base 14: mod_base = OTHER; note = 2'-deoxy-2'-fluoro ribonucleotide
  modified_base 15..21: mod_base = OTHER; note = 2'-O-methyl ribonucleotide
  modified_base 1..2: mod_base = OTHER; note = phosphorothioate internucleotide linkage
  modified_base 2..3: mod_base = OTHER; note = phosphorothioate internucleotide linkage
  modified_base 19..20: mod_base = OTHER; note = phosphorothioate internucleotide linkage
  modified_base 20..21: mod_base = OTHER; note = phosphorothioate internucleotide linkage
tgtctgagcattgtgtcagtt

SEQ ID NO: 476 - RNA, 23 nt, Synthetic construct
  source 1..23: mol_type = other RNA
  misc_feature 1: note = monophosphate
  modified_base 1: mod_base = OTHER; note = 2'-O-methyl ribonucleotide
  modified_base 2: mod_base = OTHER; note = 2'-deoxy-2'-fluoro ribonucleotide
  modified_base 3: mod_base = OTHER; note = 2'-O-methyl ribonucleotide
  modified_base 4: mod_base = OTHER; note = 2'-deoxy-2'-fluoro ribonucleotide
  modified_base 5: mod_base = OTHER; note = 2'-O-methyl ribonucleotide
  modified_base 6..7: mod_base = OTHER; note = 2'-deoxy-2'-fluoro ribonucleotide
  modified_base 8..11: mod_base = OTHER; note = 2'-O-methyl ribonucleotide
  modified_base 12: mod_base = OTHER; note = 2'-deoxy-2'-fluoro ribonucleotide
  modified_base 13: mod_base = OTHER; note = 2'-O-methyl ribonucleotide
  modified_base 14: mod_base = OTHER; note = 2'-deoxy-2'-fluoro ribonucleotide
  modified_base 15..23: mod_base = OTHER; note = 2'-O-methyl ribonucleotide
  modified_base 1..2: mod_base = OTHER; note = phosphorothioate internucleotide linkage
  modified_base 2..3: mod_base = OTHER; note = phosphorothioate internucleotide linkage
  modified_base 21..22: mod_base = OTHER; note = phosphorothioate internucleotide linkage
  modified_base 22..23: mod_base = OTHER; note = phosphorothioate internucleotide linkage
tgtctgagcattgtgtcaggttt

SEQ ID NO: 477 - RNA, 23 nt, Synthetic construct
  source 1..23: mol_type = other RNA
  misc_feature 1: note = monophosphate
  modified_base 1: mod_base = OTHER; note = 2'-O-methyl ribonucleotide
  modified_base 2: mod_base = OTHER; note = 2'-deoxy-2'-fluoro ribonucleotide
  modified_base 3: mod_base = OTHER; note = 2'-O-methyl ribonucleotide
  modified_base 4: mod_base = OTHER; note = 2'-deoxy-2'-fluoro ribonucleotide
  modified_base 5: mod_base = OTHER; note = 2'-O-methyl ribonucleotide
  modified_base 6..7: mod_base = OTHER; note = 2'-deoxy-2'-fluoro ribonucleotide
  modified_base 8..9: mod_base = OTHER; note = 2'-O-methyl ribonucleotide
  modified_base 10: mod_base = OTHER; note = 2'-deoxy-2'-fluoro ribonucleotide
  modified_base 11: mod_base = OTHER; note = 2'-O-methyl ribonucleotide
  modified_base 12: mod_base = OTHER; note = 2'-deoxy-2'-fluoro ribonucleotide
  modified_base 13: mod_base = OTHER; note = 2'-O-methyl ribonucleotide
  modified_base 14: mod_base = OTHER; note = 2'-deoxy-2'-fluoro ribonucleotide
  modified_base 15: mod_base = OTHER; note = 2'-O-methyl ribonucleotide
  modified_base 16: mod_base = OTHER; note = 2'-deoxy-2'-fluoro ribonucleotide
  modified_base 17: mod_base = OTHER; note = 2'-O-methyl ribonucleotide
  modified_base 18: mod_base = OTHER; note = 2'-deoxy-2'-fluoro ribonucleotide
  modified_base 19: mod_base = OTHER; note = 2'-O-methyl ribonucleotide
  modified_base 20: mod_base = OTHER; note = 2'-deoxy-2'-fluoro ribonucleotide
  modified_base 21: mod_base = OTHER; note = 2'-O-methyl ribonucleotide
  modified_base 22: mod_base = OTHER; note = 2'-deoxy-2'-fluoro ribonucleotide
  modified_base 23: mod_base = OTHER; note = 2'-O-methyl ribonucleotide
  modified_base 1..2: mod_base = OTHER; note = phosphorothioate internucleotide linkage
  modified_base 2..3: mod_base = OTHER; note = phosphorothioate internucleotide linkage
  modified_base 21..22: mod_base = OTHER; note = phosphorothioate internucleotide linkage
  modified_base 22..23: mod_base = OTHER; note = phosphorothioate internucleotide linkage
tgtctgagcattgtgtcaggttt

SEQ ID NO: 478 - RNA, 23 nt, Synthetic construct
  source 1..23: mol_type = other RNA
  misc_feature 1: note = monophosphate
  modified_base 1: mod_base = OTHER; note = 2'-O-methyl ribonucleotide
  modified_base 2: mod_base = OTHER; note = 2'-deoxy-2'-fluoro ribonucleotide
  modified_base 3: mod_base = OTHER; note = 2'-O-methyl ribonucleotide
  modified_base 4: mod_base = OTHER; note = 2'-deoxy-2'-fluoro ribonucleotide
  modified_base 5..6: mod_base = OTHER; note = 2'-O-methyl ribonucleotide
  modified_base 7: mod_base = OTHER; note = 2'-deoxy-2'-fluoro ribonucleotide
  modified_base 8..11: mod_base = OTHER; note = 2'-O-methyl ribonucleotide
  modified_base 12: mod_base = OTHER; note = 2'-deoxy-2'-fluoro ribonucleotide
  modified_base 13: mod_base = OTHER; note = 2'-O-methyl ribonucleotide
  modified_base 14: mod_base = OTHER; note = 2'-deoxy-2'-fluoro ribonucleotide
  modified_base 15..23: mod_base = OTHER; note = 2'-O-methyl ribonucleotide
  modified_base 1..2: mod_base = OTHER; note = phosphorothioate internucleotide linkage
  modified_base 2..3: mod_base = OTHER; note = phosphorothioate internucleotide linkage
  modified_base 21..22: mod_base = OTHER; note = phosphorothioate internucleotide linkage
  modified_base 22..23: mod_base = OTHER; note = phosphorothioate internucleotide linkage
tgtctgagcattgtgtcaggttt

SEQ ID NO: 479 - RNA, 23 nt, Synthetic construct
  source 1..23: mol_type = other RNA
  misc_feature 1: note = monophosphate
  modified_base 1: mod_base = OTHER; note = 2'-O-methyl ribonucleotide
  modified_base 2: mod_base = OTHER; note = 2'-deoxy-2'-fluoro ribonucleotide
  modified_base 3..5: mod_base = OTHER; note = 2'-O-methyl ribonucleotide
  modified_base 6..7: mod_base = OTHER; note = 2'-deoxy-2'-fluoro ribonucleotide
  modified_base 8..11: mod_base = OTHER; note = 2'-O-methyl ribonucleotide
  modified_base 12: mod_base = OTHER; note = 2'-deoxy-2'-fluoro ribonucleotide
  modified_base 13: mod_base = OTHER; note = 2'-O-methyl ribonucleotide
  modified_base 14: mod_base = OTHER; note = 2'-deoxy-2'-fluoro ribonucleotide
  modified_base 15..23: mod_base = OTHER; note = 2'-O-methyl ribonucleotide
  modified_base 1..2: mod_base = OTHER; note = phosphorothioate internucleotide linkage
  modified_base 2..3: mod_base = OTHER; note = phosphorothioate internucleotide linkage
  modified_base 21..22: mod_base = OTHER; note = phosphorothioate internucleotide linkage
  modified_base 22..23: mod_base = OTHER; note = phosphorothioate internucleotide linkage
tgtctgagcattgtgtcaggttt

SEQ ID NO: 480 - RNA, 23 nt, Synthetic construct
  source 1..23: mol_type = other RNA
  misc_feature 1: note = monophosphate
  modified_base 1: mod_base = OTHER; note = 2'-O-methyl ribonucleotide
  modified_base 2: mod_base = OTHER; note = 2'-deoxy-2'-fluoro ribonucleotide
  modified_base 3..6: mod_base = OTHER; note = 2'-O-methyl ribonucleotide
  modified_base 7: mod_base = OTHER; note = 2'-deoxy-2'-fluoro ribonucleotide
  modified_base 8..11: mod_base = OTHER; note = 2'-O-methyl ribonucleotide
  modified_base 12: mod_base = OTHER; note = 2'-deoxy-2'-fluoro ribonucleotide
  modified_base 13: mod_base = OTHER; note = 2'-O-methyl ribonucleotide
  modified_base 14: mod_base = OTHER; note = 2'-deoxy-2'-fluoro ribonucleotide
  modified_base 15..23: mod_base = OTHER; note = 2'-O-methyl ribonucleotide
  modified_base 1..2: mod_base = OTHER; note = phosphorothioate internucleotide linkage
  modified_base 2..3: mod_base = OTHER; note = phosphorothioate internucleotide linkage
  modified_base 21..22: mod_base = OTHER; note = phosphorothioate internucleotide linkage
  modified_base 22..23: mod_base = OTHER; note = phosphorothioate internucleotide linkage
tgtctgagcattgtgtcaggttt

SEQ ID NO: 481 - RNA, 23 nt, Synthetic construct
  source 1..23: mol_type = other RNA
  misc_feature 1: note = monophosphate
  modified_base 1: mod_base = OTHER; note = 2'-O-methyl ribonucleotide
  modified_base 2: mod_base = OTHER; note = 2'-deoxy-2'-fluoro ribonucleotide
  modified_base 3: mod_base = OTHER; note = 2'-O-methyl ribonucleotide
  modified_base 4: mod_base = OTHER; note = 2'-deoxy-2'-fluoro ribonucleotide
  modified_base 5: mod_base = OTHER; note = 2'-O-methyl ribonucleotide
  modified_base 6..7: mod_base = OTHER; note = 2'-deoxy-2'-fluoro ribonucleotide
  modified_base 8..9: mod_base = OTHER; note = 2'-O-methyl ribonucleotide
  modified_base 10: mod_base = OTHER; note = 2'-deoxy-2'-fluoro ribonucleotide
  modified_base 11: mod_base = OTHER; note = 2'-O-methyl ribonucleotide
  modified_base 12: mod_base = OTHER; note = 2'-deoxy-2'-fluoro ribonucleotide
  modified_base 13: mod_base = OTHER; note = 2'-O-methyl ribonucleotide
  modified_base 14: mod_base = OTHER; note = 2'-deoxy-2'-fluoro ribonucleotide
  modified_base 15..23: mod_base = OTHER; note = 2'-O-methyl ribonucleotide
  modified_base 1..2: mod_base = OTHER; note = phosphorothioate internucleotide linkage
  modified_base 2..3: mod_base = OTHER; note = phosphorothioate internucleotide linkage
  modified_base 21..22: mod_base = OTHER; note = phosphorothioate internucleotide linkage
  modified_base 22..23: mod_base = OTHER; note = phosphorothioate internucleotide linkage
tgtctgagcattgtgtcaggttt

SEQ ID NO: 482 - RNA, 23 nt, Synthetic construct
  source 1..23: mol_type = other RNA
  misc_feature 1: note = monophosphate
  modified_base 1: mod_base = OTHER; note = 2'-deoxy-2'-fluoro ribonucleotide
  modified_base 2: mod_base = OTHER; note = 2'-O-methyl ribonucleotide
  modified_base 3: mod_base = OTHER; note = 2'-deoxy-2'-fluoro ribonucleotide
  modified_base 4: mod_base = OTHER; note = 2'-O-methyl ribonucleotide
  modified_base 5: mod_base = OTHER; note = 2'-deoxy-2'-fluoro ribonucleotide
  modified_base 6: mod_base = OTHER; note = 2'-O-methyl ribonucleotide
  modified_base 7: mod_base = OTHER; note = 2'-deoxy-2'-fluoro ribonucleotide
  modified_base 8..11: mod_base = OTHER; note = 2'-O-methyl ribonucleotide
  modified_base 12: mod_base = OTHER; note = 2'-deoxy-2'-fluoro ribonucleotide
  modified_base 13: mod_base = OTHER; note = 2'-O-methyl ribonucleotide
  modified_base 14: mod_base = OTHER; note = 2'-deoxy-2'-fluoro ribonucleotide
  modified_base 15..23: mod_base = OTHER; note = 2'-O-methyl ribonucleotide
  modified_base 1..2: mod_base = OTHER; note = phosphorothioate internucleotide linkage
  modified_base 2..3: mod_base = OTHER; note = phosphorothioate internucleotide linkage
  modified_base 21..22: mod_base = OTHER; note = phosphorothioate internucleotide linkage
  modified_base 22..23: mod_base = OTHER; note = phosphorothioate internucleotide linkage
tgtctgagcattgtgtcaggttt

SEQ ID NO: 483 - RNA, 23 nt, Synthetic construct
  source 1..23: mol_type = other RNA
  misc_feature 1: note = monophosphate
  modified_base 1: mod_base = OTHER; note = 2'-O-methyl ribonucleotide
  modified_base 2: mod_base = OTHER; note = 2'-deoxy-2'-fluoro ribonucleotide
  modified_base 3: mod_base = OTHER; note = 2'-O-methyl ribonucleotide
  modified_base 4: mod_base = OTHER; note = 2'-deoxy-2'-fluoro ribonucleotide
  modified_base 5: mod_base = OTHER; note = 2'-O-methyl ribonucleotide
  modified_base 6..7: mod_base = OTHER; note = 2'-deoxy-2'-fluoro ribonucleotide
  modified_base 8..11: mod_base = OTHER; note = 2'-O-methyl ribonucleotide
  modified_base 12: mod_base = OTHER; note = 2'-deoxy-2'-fluoro ribonucleotide
  modified_base 13: mod_base = OTHER; note = 2'-O-methyl ribonucleotide
  modified_base 14: mod_base = OTHER; note = 2'-deoxy-2'-fluoro ribonucleotide
  modified_base 15..23: mod_base = OTHER; note = 2'-O-methyl ribonucleotide
  modified_base 1..2: mod_base = OTHER; note = phosphorothioate internucleotide linkage
  modified_base 2..3: mod_base = OTHER; note = phosphorothioate internucleotide linkage
  modified_base 21..22: mod_base = OTHER; note = phosphorothioate internucleotide linkage
  modified_base 22..23: mod_base = OTHER; note = phosphorothioate internucleotide linkage
cgtctgagcattgtgtcaggttt

SEQ ID NO: 484 - RNA, 21 nt, Synthetic construct
  source 1..21: mol_type = other RNA
  misc_feature 1: note = monophosphate
  modified_base 1: mod_base = OTHER; note = 2'-O-methyl ribonucleotide
  modified_base 2: mod_base = OTHER; note = 2'-deoxy-2'-fluoro ribonucleotide
  modified_base 3: mod_base = OTHER; note = 2'-O-methyl ribonucleotide
  modified_base 4: mod_base = OTHER; note = 2'-deoxy-2'-fluoro ribonucleotide
  modified_base 5: mod_base = OTHER; note = 2'-O-methyl ribonucleotide
  modified_base 6..7: mod_base = OTHER; note = 2'-deoxy-2'-fluoro ribonucleotide
  modified_base 8..11: mod_base = OTHER; note = 2'-O-methyl ribonucleotide
  modified_base 12: mod_base = OTHER; note = 2'-deoxy-2'-fluoro ribonucleotide
  modified_base 13: mod_base = OTHER; note = 2'-O-methyl ribonucleotide
  modified_base 14: mod_base = OTHER; note = 2'-deoxy-2'-fluoro ribonucleotide
  modified_base 15..21: mod_base = OTHER; note = 2'-O-methyl ribonucleotide
  modified_base 1..2: mod_base = OTHER; note = phosphorothioate internucleotide linkage
  modified_base 2..3: mod_base = OTHER; note = phosphorothioate internucleotide linkage
  modified_base 19..20: mod_base = OTHER; note = phosphorothioate internucleotide linkage
  modified_base 20..21: mod_base = OTHER; note = phosphorothioate internucleotide linkage
tgcgtctgagcattgtgtctt

SEQ ID NO: 485 - RNA, 21 nt, Synthetic construct
  source 1..21: mol_type = other RNA
  misc_feature 1: note = monophosphate
  modified_base 1: mod_base = OTHER; note = 2'-O-methyl ribonucleotide
  modified_base 2: mod_base = OTHER; note = 2'-deoxy-2'-fluoro ribonucleotide
  modified_base 3: mod_base = OTHER; note = 2'-O-methyl ribonucleotide
  modified_base 4: mod_base = OTHER; note = 2'-deoxy-2'-fluoro ribonucleotide
  modified_base 5: mod_base = OTHER; note = 2'-O-methyl ribonucleotide
  modified_base 6..7: mod_base = OTHER; note = 2'-deoxy-2'-fluoro ribonucleotide
  modified_base 8..11: mod_base = OTHER; note = 2'-O-methyl ribonucleotide
  modified_base 12: mod_base = OTHER; note = 2'-deoxy-2'-fluoro ribonucleotide
  modified_base 13: mod_base = OTHER; note = 2'-O-methyl ribonucleotide
  modified_base 14: mod_base = OTHER; note = 2'-deoxy-2'-fluoro ribonucleotide
  modified_base 15..21: mod_base = OTHER; note = 2'-O-methyl ribonucleotide
  modified_base 1..2: mod_base = OTHER; note = phosphorothioate internucleotide linkage
  modified_base 2..3: mod_base = OTHER; note = phosphorothioate internucleotide linkage
  modified_base 19..20: mod_base = OTHER; note = phosphorothioate internucleotide linkage
  modified_base 20..21: mod_base = OTHER; note = phosphorothioate internucleotide linkage
ctgcgtctgagcattgtgttt

SEQ ID NO: 486 - RNA, 23 nt, Synthetic construct
  source 1..23: mol_type = other RNA
  misc_feature 1: note = monophosphate
  modified_base 1: mod_base = OTHER; note = 2'-O-methyl ribonucleotide
  modified_base 2: mod_base = OTHER; note = 2'-deoxy-2'-fluoro ribonucleotide
  modified_base 3: mod_base = OTHER; note = 2'-O-methyl ribonucleotide
  modified_base 4: mod_base = OTHER; note = 2'-deoxy-2'-fluoro ribonucleotide
  modified_base 5: mod_base = OTHER; note = 2'-O-methyl ribonucleotide
  modified_base 6..7: mod_base = OTHER; note = 2'-deoxy-2'-fluoro ribonucleotide
  modified_base 8..11: mod_base = OTHER; note = 2'-O-methyl ribonucleotide
  modified_base 12: mod_base = OTHER; note = 2'-deoxy-2'-fluoro ribonucleotide
  modified_base 13: mod_base = OTHER; note = 2'-O-methyl ribonucleotide
  modified_base 14: mod_base = OTHER; note = 2'-deoxy-2'-fluoro ribonucleotide
  modified_base 15..23: mod_base = OTHER; note = 2'-O-methyl ribonucleotide
  modified_base 1..2: mod_base = OTHER; note = phosphorothioate internucleotide linkage
  modified_base 2..3: mod_base = OTHER; note = phosphorothioate internucleotide linkage
  modified_base 21..22: mod_base = OTHER; note = phosphorothioate internucleotide linkage
  modified_base 22..23: mod_base = OTHER; note = phosphorothioate internucleotide linkage
ctgcgtctgagcattgtgtcatt

SEQ ID NO: 487 - RNA, 23 nt, Synthetic construct
  source 1..23: mol_type = other RNA
  modified_base 1: mod_base = OTHER; note = 2'-O-methyl ribonucleotide
  modified_base 2: mod_base = OTHER; note = 2'-deoxy-2'-fluoro ribonucleotide
  modified_base 3: mod_base = OTHER; note = 2'-O-methyl ribonucleotide
  modified_base 4: mod_base = OTHER; note = 2'-deoxy-2'-fluoro ribonucleotide
  modified_base 5: mod_base = OTHER; note = 2'-O-methyl ribonucleotide
  modified_base 6..7: mod_base = OTHER; note = 2'-deoxy-2'-fluoro ribonucleotide
  modified_base 8..11: mod_base = OTHER; note = 2'-O-methyl ribonucleotide
  modified_base 12: mod_base = OTHER; note = 2'-deoxy-2'-fluoro ribonucleotide
  modified_base 13: mod_base = OTHER; note = 2'-O-methyl ribonucleotide
  modified_base 14: mod_base = OTHER; note = 2'-deoxy-2'-fluoro ribonucleotide
  modified_base 15..23: mod_base = OTHER; note = 2'-O-methyl ribonucleotide
  modified_base 1..2: mod_base = OTHER; note = phosphorothioate internucleotide linkage
  modified_base 2..3: mod_base = OTHER; note = phosphorothioate internucleotide linkage
  modified_base 21..22: mod_base = OTHER; note = phosphorothioate internucleotide linkage
  modified_base 22..23: mod_base = OTHER; note = phosphorothioate internucleotide linkage
ttgcgtctgagcattgtgtcatt

SEQ ID NO: 488 - RNA, 23 nt, Synthetic construct
  source 1..23: mol_type = other RNA
  modified_base 1: mod_base = OTHER; note = 2'-O-methyl ribonucleotide
  modified_base 2: mod_base = OTHER; note = 2'-deoxy-2'-fluoro ribonucleotide
  modified_base 3: mod_base = OTHER; note = 2'-O-methyl ribonucleotide
  modified_base 4: mod_base = OTHER; note = 2'-deoxy-2'-fluoro ribonucleotide
  modified_base 5: mod_base = OTHER; note = 2'-O-methyl ribonucleotide
  modified_base 6: mod_base = OTHER; note = 2'-deoxy-2'-fluoro ribonucleotide
  modified_base 7: mod_base = OTHER; note = 2'-O-methyl ribonucleotide
  modified_base 8..9: mod_base = OTHER; note = 2'-deoxy-2'-fluoro ribonucleotide
  modified_base 10..13: mod_base = OTHER; note = 2'-O-methyl ribonucleotide
  modified_base 14: mod_base = OTHER; note = 2'-deoxy-2'-fluoro ribonucleotide
  modified_base 15: mod_base = OTHER; note = 2'-O-methyl ribonucleotide
  modified_base 16: mod_base = OTHER; note = 2'-deoxy-2'-fluoro ribonucleotide
  modified_base 17..23: mod_base = OTHER; note = 2'-O-methyl ribonucleotide
  modified_base 1..2: mod_base = OTHER; note = phosphorothioate internucleotide linkage
  modified_base 2..3: mod_base = OTHER; note = phosphorothioate internucleotide linkage
  modified_base 21..22: mod_base = OTHER; note = phosphorothioate internucleotide linkage
  modified_base 22..23: mod_base = OTHER; note = phosphorothioate internucleotide linkage
ttgcgtctgagcattgtgtcatt

SEQ ID NO: 489 - RNA, 23 nt, Synthetic construct
  source 1..23: mol_type = other RNA
  modified_base 1: mod_base = OTHER; note = 2'-O-methyl ribonucleotide
  modified_base 2: mod_base = OTHER; note = 2'-deoxy-2'-fluoro ribonucleotide
  modified_base 3: mod_base = OTHER; note = 2'-O-methyl ribonucleotide
  modified_base 4: mod_base = OTHER; note = 2'-deoxy-2'-fluoro ribonucleotide
  modified_base 5..6: mod_base = OTHER; note = 2'-O-methyl ribonucleotide
  modified_base 7: mod_base = OTHER; note = 2'-deoxy-2'-fluoro ribonucleotide
  modified_base 8..11: mod_base = OTHER; note = 2'-O-methyl ribonucleotide
  modified_base 12: mod_base = OTHER; note = 2'-deoxy-2'-fluoro ribonucleotide
  modified_base 13: mod_base = OTHER; note = 2'-O-methyl ribonucleotide
  modified_base 14: mod_base = OTHER; note = 2'-deoxy-2'-fluoro ribonucleotide
  modified_base 15..23: mod_base = OTHER; note = 2'-O-methyl ribonucleotide
  modified_base 1..2: mod_base = OTHER; note = phosphorothioate internucleotide linkage
  modified_base 2..3: mod_base = OTHER; note = phosphorothioate internucleotide linkage
  modified_base 21..22: mod_base = OTHER; note = phosphorothioate internucleotide linkage
  modified_base 22..23: mod_base = OTHER; note = phosphorothioate internucleotide linkage
ttgcgtctgagcattgtgtcatt

SEQ ID NO: 490 - RNA, 23 nt, Synthetic construct
  source 1..23: mol_type = other RNA
  modified_base 1: mod_base = OTHER; note = 2'-O-methyl ribonucleotide
  modified_base 2: mod_base = OTHER; note = 2'-deoxy-2'-fluoro ribonucleotide
  modified_base 3: mod_base = OTHER; note = 2'-O-methyl ribonucleotide
  modified_base 4: mod_base = OTHER; note = 2'-deoxy-2'-fluoro ribonucleotide
  modified_base 5: mod_base = OTHER; note = 2'-O-methyl ribonucleotide
  modified_base 6..7: mod_base = OTHER; note = 2'-deoxy-2'-fluoro ribonucleotide
  modified_base 8..9: mod_base = OTHER; note = 2'-O-methyl ribonucleotide
  modified_base 10: mod_base = OTHER; note = 2'-deoxy-2'-fluoro ribonucleotide
  modified_base 11: mod_base = OTHER; note = 2'-O-methyl ribonucleotide
  modified_base 12: mod_base = OTHER; note = 2'-deoxy-2'-fluoro ribonucleotide
  modified_base 13: mod_base = OTHER; note = 2'-O-methyl ribonucleotide
  modified_base 14: mod_base = OTHER; note = 2'-deoxy-2'-fluoro ribonucleotide
  modified_base 15..23: mod_base = OTHER; note = 2'-O-methyl ribonucleotide
  modified_base 1..2: mod_base = OTHER; note = phosphorothioate internucleotide linkage
  modified_base 2..3: mod_base = OTHER; note = phosphorothioate internucleotide linkage
  modified_base 21..22: mod_base = OTHER; note = phosphorothioate internucleotide linkage
  modified_base 22..23: mod_base = OTHER; note = phosphorothioate internucleotide linkage
ttgcgtctgagcattgtgtcatt

SEQ ID NO: 491 - RNA, 23 nt, Synthetic construct
  source 1..23: mol_type = other RNA
  modified_base 1: mod_base = OTHER; note = 2'-O-methyl ribonucleotide
  modified_base 2: mod_base = OTHER; note = 2'-deoxy-2'-fluoro ribonucleotide
  modified_base 3..6: mod_base = OTHER; note = 2'-O-methyl ribonucleotide
  modified_base 7: mod_base = OTHER; note = 2'-deoxy-2'-fluoro ribonucleotide
  modified_base 8..11: mod_base = OTHER; note = 2'-O-methyl ribonucleotide
  modified_base 12: mod_base = OTHER; note = 2'-deoxy-2'-fluoro ribonucleotide
  modified_base 13: mod_base = OTHER; note = 2'-O-methyl ribonucleotide
  modified_base 14: mod_base = OTHER; note = 2'-deoxy-2'-fluoro ribonucleotide
  modified_base 15..23: mod_base = OTHER; note = 2'-O-methyl ribonucleotide
  modified_base 1..2: mod_base = OTHER; note = phosphorothioate internucleotide linkage
  modified_base 2..3: mod_base = OTHER; note = phosphorothioate internucleotide linkage
  modified_base 21..22: mod_base = OTHER; note = phosphorothioate internucleotide linkage
  modified_base 22..23: mod_base = OTHER; note = phosphorothioate internucleotide linkage
ttgcgtctgagcattgtgtcatt

SEQ ID NO: 492 - RNA, 21 nt, Synthetic construct
  source 1..21: mol_type = other RNA
  modified_base 1: mod_base = OTHER; note = 2'-O-methyl ribonucleotide
  modified_base 2: mod_base = OTHER; note = 2'-deoxy-2'-fluoro ribonucleotide
  modified_base 3..6: mod_base = OTHER; note = 2'-O-methyl ribonucleotide
  modified_base 7: mod_base = OTHER; note = 2'-deoxy-2'-fluoro ribonucleotide
  modified_base 8..11: mod_base = OTHER; note = 2'-O-methyl ribonucleotide
  modified_base 12: mod_base = OTHER; note = 2'-deoxy-2'-fluoro ribonucleotide
  modified_base 13: mod_base = OTHER; note = 2'-O-methyl ribonucleotide
  modified_base 14: mod_base = OTHER; note = 2'-deoxy-2'-fluoro ribonucleotide
  modified_base 15..21: mod_base = OTHER; note = 2'-O-methyl ribonucleotide
  modified_base 1..2: mod_base = OTHER; note = phosphorothioate internucleotide linkage
  modified_base 2..3: mod_base = OTHER; note = phosphorothioate internucleotide linkage
  modified_base 19..20: mod_base = OTHER; note = phosphorothioate internucleotide linkage
  modified_base 20..21: mod_base = OTHER; note = phosphorothioate internucleotide linkage
ttgcgtctgagcattgtgttt

SEQ ID NO: 493 - RNA, 21 nt, Synthetic construct
  source 1..21: mol_type = other RNA
  modified_base 1: mod_base = OTHER; note = 2'-O-methyl ribonucleotide
  modified_base 2: mod_base = OTHER; note = 2'-deoxy-2'-fluoro ribonucleotide
  modified_base 3..6: mod_base = OTHER; note = 2'-O-methyl ribonucleotide
  modified_base 7: mod_base = OTHER; note = 2'-deoxy-2'-fluoro ribonucleotide
  modified_base 8..13: mod_base = OTHER; note = 2'-O-methyl ribonucleotide
  modified_base 14: mod_base = OTHER; note = 2'-deoxy-2'-fluoro ribonucleotide
  modified_base 15: mod_base = OTHER; note = 2'-O-methyl ribonucleotide
  modified_base 16: mod_base = OTHER; note = 2'-deoxy-2'-fluoro ribonucleotide
  modified_base 17..21: mod_base = OTHER; note = 2'-O-methyl ribonucleotide
  modified_base 1..2: mod_base = OTHER; note = phosphorothioate internucleotide linkage
  modified_base 2..3: mod_base = OTHER; note = phosphorothioate internucleotide linkage
  modified_base 19..20: mod_base = OTHER; note = phosphorothioate internucleotide linkage
  modified_base 20..21: mod_base = OTHER; note = phosphorothioate internucleotide linkage
ttgcgtctgagcattgtgttt

SEQ ID NO: 494 - RNA, 23 nt, Synthetic construct
  source 1..23: mol_type = other RNA
  modified_base 1: mod_base = OTHER; note = 2'-O-methyl ribonucleotide
  modified_base 2: mod_base = OTHER; note = 2'-deoxy-2'-fluoro ribonucleotide
  modified_base 3: mod_base = OTHER; note = 2'-O-methyl ribonucleotide
  modified_base 4: mod_base = OTHER; note = 2'-deoxy-2'-fluoro ribonucleotide
  modified_base 5: mod_base = OTHER; note = 2'-O-methyl ribonucleotide
  modified_base 6: mod_base = OTHER; note = 2'-deoxy-2'-fluoro ribonucleotide
  modified_base 7..13: mod_base = OTHER; note = 2'-O-methyl ribonucleotide
  modified_base 14: mod_base = OTHER; note = 2'-deoxy-2'-fluoro ribonucleotide
  modified_base 15: mod_base = OTHER; note = 2'-O-methyl ribonucleotide
  modified_base 16: mod_base = OTHER; note = 2'-deoxy-2'-fluoro ribonucleotide
  modified_base 17..23: mod_base = OTHER; note = 2'-O-methyl ribonucleotide
  modified_base 1..2: mod_base = OTHER; note = phosphorothioate internucleotide linkage
  modified_base 2..3: mod_base = OTHER; note = phosphorothioate internucleotide linkage
  modified_base 21..22: mod_base = OTHER; note = phosphorothioate internucleotide linkage
  modified_base 22..23: mod_base = OTHER; note = phosphorothioate internucleotide linkage
ttgcgtctgagcattgtgtcatt

SEQ ID NO: 495 - RNA, 23 nt, Synthetic construct
  source 1..23: mol_type = other RNA
  modified_base 1: mod_base = OTHER; note = 2'-O-methyl ribonucleotide
  modified_base 2: mod_base = OTHER; note = 2'-deoxy-2'-fluoro ribonucleotide
  modified_base 3..6: mod_base = OTHER; note = 2'-O-methyl ribonucleotide
  modified_base 7: mod_base = OTHER; note = 2'-deoxy-2'-fluoro ribonucleotide
  modified_base 8..13: mod_base = OTHER; note = 2'-O-methyl ribonucleotide
  modified_base 14: mod_base = OTHER; note = 2'-deoxy-2'-fluoro ribonucleotide
  modified_base 15: mod_base = OTHER; note = 2'-O-methyl ribonucleotide
  modified_base 16: mod_base = OTHER; note = 2'-deoxy-2'-fluoro ribonucleotide
  modified_base 17..23: mod_base = OTHER; note = 2'-O-methyl ribonucleotide
  modified_base 1..2: mod_base = OTHER; note = phosphorothioate internucleotide linkage
  modified_base 2..3: mod_base = OTHER; note = phosphorothioate internucleotide linkage
  modified_base 21..22: mod_base = OTHER; note = phosphorothioate internucleotide linkage
  modified_base 22..23: mod_base = OTHER; note = phosphorothioate internucleotide linkage
ttgcgtctgagcattgtgtcatt

SEQ ID NO: 496 - RNA, 21 nt, Synthetic construct
  source 1..21: mol_type = other RNA
  modified_base 1: mod_base = OTHER; note = 2'-O-methyl ribonucleotide
  modified_base 2: mod_base = OTHER; note = 2'-deoxy-2'-fluoro ribonucleotide
  modified_base 3..6: mod_base = OTHER; note = 2'-O-methyl ribonucleotide
  modified_base 7: mod_base = OTHER; note = 2'-deoxy-2'-fluoro ribonucleotide
  modified_base 8..11: mod_base = OTHER; note = 2'-O-methyl ribonucleotide
  modified_base 12: mod_base = OTHER; note = 2'-deoxy-2'-fluoro ribonucleotide
  modified_base 13: mod_base = OTHER; note = 2'-O-methyl ribonucleotide
  modified_base 14: mod_base = OTHER; note = 2'-deoxy-2'-fluoro ribonucleotide
  modified_base 15..21: mod_base = OTHER; note = 2'-O-methyl ribonucleotide
  modified_base 1..2: mod_base = OTHER; note = phosphorothioate internucleotide linkage
  modified_base 2..3: mod_base = OTHER; note = phosphorothioate internucleotide linkage
  modified_base 19..20: mod_base = OTHER; note = phosphorothioate internucleotide linkage
  modified_base 20..21: mod_base = OTHER; note = phosphorothioate internucleotide linkage
ttgcgtctgagcattgtgtca

SEQ ID NO: 497 - RNA, 21 nt, Synthetic construct
  source 1..21: mol_type = other RNA
  misc_feature 1: note = monophosphate
  modified_base 1: mod_base = OTHER; note = 2'-O-methyl ribonucleotide
  modified_base 2: mod_base = OTHER; note = 2'-deoxy-2'-fluoro ribonucleotide
  modified_base 3: mod_base = OTHER; note = 2'-O-methyl ribonucleotide
  modified_base 4: mod_base = OTHER; note = 2'-deoxy-2'-fluoro ribonucleotide
  modified_base 5: mod_base = OTHER; note = 2'-O-methyl ribonucleotide
  modified_base 6..7: mod_base = OTHER; note = 2'-deoxy-2'-fluoro ribonucleotide
  modified_base 8..11: mod_base = OTHER; note = 2'-O-methyl ribonucleotide
  modified_base 12: mod_base = OTHER; note = 2'-deoxy-2'-fluoro ribonucleotide
  modified_base 13: mod_base = OTHER; note = 2'-O-methyl ribonucleotide
  modified_base 14: mod_base = OTHER; note = 2'-deoxy-2'-fluoro ribonucleotide
  modified_base 15..21: mod_base = OTHER; note = 2'-O-methyl ribonucleotide
  modified_base 1..2: mod_base = OTHER; note = phosphorothioate internucleotide linkage
  modified_base 2..3: mod_base = OTHER; note = phosphorothioate internucleotide linkage
  modified_base 19..20: mod_base = OTHER; note = phosphorothioate internucleotide linkage
  modified_base 20..21: mod_base = OTHER; note = phosphorothioate internucleotide linkage
ttcagaaggagcctctaggtt

SEQ ID NO: 498 - RNA, 21 nt, Synthetic construct
  source 1..21: mol_type = other RNA
  misc_feature 1: note = monophosphate
  modified_base 1: mod_base = OTHER; note = 2'-O-methyl ribonucleotide
  modified_base 2: mod_base = OTHER; note = 2'-deoxy-2'-fluoro ribonucleotide
  modified_base 3: mod_base = OTHER; note = 2'-O-methyl ribonucleotide
  modified_base 4: mod_base = OTHER; note = 2'-deoxy-2'-fluoro ribonucleotide
  modified_base 5: mod_base = OTHER; note = 2'-O-methyl ribonucleotide
  modified_base 6..7: mod_base = OTHER; note = 2'-deoxy-2'-fluoro ribonucleotide
  modified_base 8..11: mod_base = OTHER; note = 2'-O-methyl ribonucleotide
  modified_base 12: mod_base = OTHER; note = 2'-deoxy-2'-fluoro ribonucleotide
  modified_base 13: mod_base = OTHER; note = 2'-O-methyl ribonucleotide
  modified_base 14: mod_base = OTHER; note = 2'-deoxy-2'-fluoro ribonucleotide
  modified_base 15: mod_base = OTHER; note = 2'-O-methyl ribonucleotide
  modified_base 16: mod_base = OTHER; note = 2'-deoxy-2'-fluoro ribonucleotide
  modified_base 17: mod_base = OTHER; note = 2'-O-methyl ribonucleotide
  modified_base 18: mod_base = OTHER; note = 2'-deoxy-2'-fluoro ribonucleotide
  modified_base 19: mod_base = OTHER; note = 2'-O-methyl ribonucleotide
  modified_base 20: mod_base = OTHER; note = 2'-deoxy-2'-fluoro ribonucleotide
  modified_base 21: mod_base = OTHER; note = 2'-O-methyl ribonucleotide
  modified_base 1..2: mod_base = OTHER; note = phosphorothioate internucleotide linkage
  modified_base 2..3: mod_base = OTHER; note = phosphorothioate internucleotide linkage
  modified_base 19..20: mod_base = OTHER; note = phosphorothioate internucleotide linkage
  modified_base 20..21: mod_base = OTHER; note = phosphorothioate internucleotide linkage
ttcagaaggagcctctaggtt

SEQ ID NO: 499 - RNA, 23 nt, Synthetic construct
  source 1..23: mol_type = other RNA
  misc_feature 1: note = monophosphate
  modified_base 1: mod_base = OTHER; note = 2'-O-methyl ribonucleotide
  modified_base 2: mod_base = OTHER; note = 2'-deoxy-2'-fluoro ribonucleotide
  modified_base 3: mod_base = OTHER; note = 2'-O-methyl ribonucleotide
  modified_base 4: mod_base = OTHER; note = 2'-deoxy-2'-fluoro ribonucleotide
  modified_base 5: mod_base = OTHER; note = 2'-O-methyl ribonucleotide
  modified_base 6..7: mod_base = OTHER; note = 2'-deoxy-2'-fluoro ribonucleotide
  modified_base 8..11: mod_base = OTHER; note = 2'-O-methyl ribonucleotide
  modified_base 12: mod_base = OTHER; note = 2'-deoxy-2'-fluoro ribonucleotide
  modified_base 13: mod_base = OTHER; note = 2'-O-methyl ribonucleotide
  modified_base 14: mod_base = OTHER; note = 2'-deoxy-2'-fluoro ribonucleotide
  modified_base 15..23: mod_base = OTHER; note = 2'-O-methyl ribonucleotide
  modified_base 1..2: mod_base = OTHER; note = phosphorothioate internucleotide linkage
  modified_base 2..3: mod_base = OTHER; note = phosphorothioate internucleotide linkage
  modified_base 21..22: mod_base = OTHER; note = phosphorothioate internucleotide linkage
  modified_base 22..23: mod_base = OTHER; note = phosphorothioate internucleotide linkage
ttcagaaggagcctctaggcttt

SEQ ID NO: 500 - RNA, 21 nt, Synthetic construct
  source 1..21: mol_type = other RNA
  modified_base 1: mod_base = OTHER; note = 2'-O-methyl ribonucleotide
  modified_base 2: mod_base = OTHER; note = 2'-deoxy-2'-fluoro ribonucleotide
  modified_base 3: mod_base = OTHER; note = 2'-O-methyl ribonucleotide
  modified_base 4: mod_base = OTHER; note = 2'-deoxy-2'-fluoro ribonucleotide
  modified_base 5: mod_base = OTHER; note = 2'-O-methyl ribonucleotide
  modified_base 6..7: mod_base = OTHER; note = 2'-deoxy-2'-fluoro ribonucleotide
  modified_base 8..11: mod_base = OTHER; note = 2'-O-methyl ribonucleotide
  modified_base 12: mod_base = OTHER; note = 2'-deoxy-2'-fluoro ribonucleotide
  modified_base 13: mod_base = OTHER; note = 2'-O-methyl ribonucleotide
  modified_base 14: mod_base = OTHER; note = 2'-deoxy-2'-fluoro ribonucleotide
  modified_base 15..21: mod_base = OTHER; note = 2'-O-methyl ribonucleotide
  modified_base 1..2: mod_base = OTHER; note = phosphorothioate internucleotide linkage
  modified_base 2..3: mod_base = OTHER; note = phosphorothioate internucleotide linkage
  modified_base 19..20: mod_base = OTHER; note = phosphorothioate internucleotide linkage
  modified_base 20..21: mod_base = OTHER; note = phosphorothioate internucleotide linkage
ttcagaaggagcctctaggtt

SEQ ID NO: 501 - RNA, 23 nt, Synthetic construct
  source 1..23: mol_type = other RNA
  modified_base 1: mod_base = OTHER; note = 2'-O-methyl ribonucleotide
  modified_base 2: mod_base = OTHER; note = 2'-deoxy-2'-fluoro ribonucleotide
  modified_base 3: mod_base = OTHER; note = 2'-O-methyl ribonucleotide
  modified_base 4: mod_base = OTHER; note = 2'-deoxy-2'-fluoro ribonucleotide
  modified_base 5: mod_base = OTHER; note = 2'-O-methyl ribonucleotide
  modified_base 6: mod_base = OTHER; note = 2'-deoxy-2'-fluoro ribonucleotide
  modified_base 7: mod_base = OTHER; note = 2'-O-methyl ribonucleotide
  modified_base 8..9: mod_base = OTHER; note = 2'-deoxy-2'-fluoro ribonucleotide
  modified_base 10..13: mod_base = OTHER; note = 2'-O-methyl ribonucleotide
  modified_base 14: mod_base = OTHER; note = 2'-deoxy-2'-fluoro ribonucleotide
  modified_base 15: mod_base = OTHER; note = 2'-O-methyl ribonucleotide
  modified_base 16: mod_base = OTHER; note = 2'-deoxy-2'-fluoro ribonucleotide
  modified_base 17..23: mod_base = OTHER; note = 2'-O-methyl ribonucleotide
  modified_base 1..2: mod_base = OTHER; note = phosphorothioate internucleotide linkage
  modified_base 2..3: mod_base = OTHER; note = phosphorothioate internucleotide linkage
  modified_base 21..22: mod_base = OTHER; note = phosphorothioate internucleotide linkage
  modified_base 22..23: mod_base = OTHER; note = phosphorothioate internucleotide linkage
ttcagaaggagcctctaggcttt

SEQ ID NO: 502 - RNA, 21 nt, Synthetic construct
  source 1..21: mol_type = other RNA
  misc_feature 1: note = monophosphate
  modified_base 1: mod_base = OTHER; note = 2'-O-methyl ribonucleotide
  modified_base 2: mod_base = OTHER; note = 2'-deoxy-2'-fluoro ribonucleotide
  modified_base 3: mod_base = OTHER; note = 2'-O-methyl ribonucleotide
  modified_base 4: mod_base = OTHER; note = 2'-deoxy-2'-fluoro ribonucleotide
  modified_base 5: mod_base = OTHER; note = 2'-O-methyl ribonucleotide
  modified_base 6..7: mod_base = OTHER; note = 2'-deoxy-2'-fluoro ribonucleotide
  modified_base 8..11: mod_base = OTHER; note = 2'-O-methyl ribonucleotide
  modified_base 12: mod_base = OTHER; note = 2'-deoxy-2'-fluoro ribonucleotide
  modified_base 13: mod_base = OTHER; note = 2'-O-methyl ribonucleotide
  modified_base 14: mod_base = OTHER; note = 2'-deoxy-2'-fluoro ribonucleotide
  modified_base 15..21: mod_base = OTHER; note = 2'-O-methyl ribonucleotide
  modified_base 1..2: mod_base = OTHER; note = phosphorothioate internucleotide linkage
  modified_base 2..3: mod_base = OTHER; note = phosphorothioate internucleotide linkage
  modified_base 19..20: mod_base = OTHER; note = phosphorothioate internucleotide linkage
  modified_base 20..21: mod_base = OTHER; note = phosphorothioate internucleotide linkage
ttgttcagaaggagcctcttt

SEQ ID NO: 503 - RNA, 21 nt, Synthetic construct
  source 1..21: mol_type = other RNA
  misc_feature 1: note = monophosphate
  modified_base 1: mod_base = OTHER; note = 2'-O-methyl ribonucleotide
  modified_base 2: mod_base = OTHER; note = 2'-deoxy-2'-fluoro ribonucleotide
  modified_base 3: mod_base = OTHER; note = 2'-O-methyl ribonucleotide
  modified_base 4: mod_base = OTHER; note = 2'-deoxy-2'-fluoro ribonucleotide
  modified_base 5: mod_base = OTHER; note = 2'-O-methyl ribonucleotide
  modified_base 6..7: mod_base = OTHER; note = 2'-deoxy-2'-fluoro ribonucleotide
  modified_base 8..11: mod_base = OTHER; note = 2'-O-methyl ribonucleotide
  modified_base 12: mod_base = OTHER; note = 2'-deoxy-2'-fluoro ribonucleotide
  modified_base 13: mod_base = OTHER; note = 2'-O-methyl ribonucleotide
  modified_base 14: mod_base = OTHER; note = 2'-deoxy-2'-fluoro ribonucleotide
  modified_base 15..21: mod_base = OTHER; note = 2'-O-methyl ribonucleotide
  modified_base 1..2: mod_base = OTHER; note = phosphorothioate internucleotide linkage
  modified_base 2..3: mod_base = OTHER; note = phosphorothioate internucleotide linkage
  modified_base 19..20: mod_base = OTHER; note = phosphorothioate internucleotide linkage
  modified_base 20..21: mod_base = OTHER; note = phosphorothioate internucleotide linkage
tctttgctcagttggtgcttt

SEQ ID NO: 504 - RNA, 21 nt, Synthetic construct
  source 1..21: mol_type = other RNA
  misc_feature 1: note = monophosphate
  modified_base 1: mod_base = OTHER; note = 2'-O-methyl ribonucleotide
  modified_base 2: mod_base = OTHER; note = 2'-deoxy-2'-fluoro ribonucleotide
  modified_base 3: mod_base = OTHER; note = 2'-O-methyl ribonucleotide
  modified_base 4: mod_base = OTHER; note = 2'-deoxy-2'-fluoro ribonucleotide
  modified_base 5: mod_base = OTHER; note = 2'-O-methyl ribonucleotide
  modified_base 6..7: mod_base = OTHER; note = 2'-deoxy-2'-fluoro ribonucleotide
  modified_base 8..11: mod_base = OTHER; note = 2'-O-methyl ribonucleotide
  modified_base 12: mod_base = OTHER; note = 2'-deoxy-2'-fluoro ribonucleotide
  modified_base 13: mod_base = OTHER; note = 2'-O-methyl ribonucleotide
  modified_base 14: mod_base = OTHER; note = 2'-deoxy-2'-fluoro ribonucleotide
  modified_base 15..21: mod_base = OTHER; note = 2'-O-methyl ribonucleotide
  modified_base 1..2: mod_base = OTHER; note = phosphorothioate internucleotide linkage
  modified_base 2..3: mod_base = OTHER; note = phosphorothioate internucleotide linkage
  modified_base 19..20: mod_base = OTHER; note = phosphorothioate internucleotide linkage
  modified_base 20..21: mod_base = OTHER; note = phosphorothioate internucleotide linkage
tgccacaggatctggattttt

SEQ ID NO: 505 - RNA, 21 nt, Synthetic construct
  source 1..21: mol_type = other RNA
  misc_feature 1: note = monophosphate
  modified_base 1: mod_base = OTHER; note = 2'-O-methyl ribonucleotide
  modified_base 2: mod_base = OTHER; note = 2'-deoxy-2'-fluoro ribonucleotide
  modified_base 3: mod_base = OTHER; note = 2'-O-methyl ribonucleotide
  modified_base 4: mod_base = OTHER; note = 2'-deoxy-2'-fluoro ribonucleotide
  modified_base 5: mod_base = OTHER; note = 2'-O-methyl ribonucleotide
  modified_base 6..7: mod_base = OTHER; note = 2'-deoxy-2'-fluoro ribonucleotide
  modified_base 8..11: mod_base = OTHER; note = 2'-O-methyl ribonucleotide
  modified_base 12: mod_base = OTHER; note = 2'-deoxy-2'-fluoro ribonucleotide
  modified_base 13: mod_base = OTHER; note = 2'-O-methyl ribonucleotide
  modified_base 14: mod_base = OTHER; note = 2'-deoxy-2'-fluoro ribonucleotide
  modified_base 15: mod_base = OTHER; note = 2'-O-methyl ribonucleotide
  modified_base 16: mod_base = OTHER; note = 2'-deoxy-2'-fluoro ribonucleotide
  modified_base 17: mod_base = OTHER; note = 2'-O-methyl ribonucleotide
  modified_base 18: mod_base = OTHER; note = 2'-deoxy-2'-fluoro ribonucleotide
  modified_base 19: mod_base = OTHER; note = 2'-O-methyl ribonucleotide
  modified_base 20: mod_base = OTHER; note = 2'-deoxy-2'-fluoro ribonucleotide
  modified_base 21: mod_base = OTHER; note = 2'-O-methyl ribonucleotide
  modified_base 1..2: mod_base = OTHER; note = phosphorothioate internucleotide linkage
  modified_base 2..3: mod_base = OTHER; note = phosphorothioate internucleotide linkage
  modified_base 19..20: mod_base = OTHER; note = phosphorothioate internucleotide linkage
  modified_base 20..21: mod_base = OTHER; note = phosphorothioate internucleotide linkage
ataacaccaaggggctgcctt

SEQ ID NO: 506 - RNA, 21 nt, Synthetic construct
  source 1..21: mol_type = other RNA
  misc_feature 1: note = monophosphate
  modified_base 1: mod_base = OTHER; note = 2'-O-methyl ribonucleotide
  modified_base 2: mod_base = OTHER; note = 2'-deoxy-2'-fluoro ribonucleotide
  modified_base 3: mod_base = OTHER; note = 2'-O-methyl ribonucleotide
  modified_base 4: mod_base = OTHER; note = 2'-deoxy-2'-fluoro ribonucleotide
  modified_base 5: mod_base = OTHER; note = 2'-O-methyl ribonucleotide
  modified_base 6..7: mod_base = OTHER; note = 2'-deoxy-2'-fluoro ribonucleotide
  modified_base 8..11: mod_base = OTHER; note = 2'-O-methyl ribonucleotide
  modified_base 12: mod_base = OTHER; note = 2'-deoxy-2'-fluoro ribonucleotide
  modified_base 13: mod_base = OTHER; note = 2'-O-methyl ribonucleotide
  modified_base 14: mod_base = OTHER; note = 2'-deoxy-2'-fluoro ribonucleotide
  modified_base 15..21: mod_base = OTHER; note = 2'-O-methyl ribonucleotide
  modified_base 1..2: mod_base = OTHER; note = phosphorothioate internucleotide linkage
  modified_base 2..3: mod_base = OTHER; note = phosphorothioate internucleotide linkage
  modified_base 19..20: mod_base = OTHER; note = phosphorothioate internucleotide linkage
  modified_base 20..21: mod_base = OTHER; note = phosphorothioate internucleotide linkage
accaagcttggcaagttcttt

SEQ ID NO: 507 - RNA, 23 nt, Synthetic construct
  source 1..23: mol_type = other RNA
  misc_feature 1: note = monophosphate
  modified_base 1: mod_base = OTHER; note = 2'-O-methyl ribonucleotide
  modified_base 2: mod_base = OTHER; note = 2'-deoxy-2'-fluoro ribonucleotide
  modified_base 3: mod_base = OTHER; note = 2'-O-methyl ribonucleotide
  modified_base 4: mod_base = OTHER; note = 2'-deoxy-2'-fluoro ribonucleotide
  modified_base 5: mod_base = OTHER; note = 2'-O-methyl ribonucleotide
  modified_base 6..7: mod_base = OTHER; note = 2'-deoxy-2'-fluoro ribonucleotide
  modified_base 8..11: mod_base = OTHER; note = 2'-O-methyl ribonucleotide
  modified_base 12: mod_base = OTHER; note = 2'-deoxy-2'-fluoro ribonucleotide
  modified_base 13: mod_base = OTHER; note = 2'-O-methyl ribonucleotide
  modified_base 14: mod_base = OTHER; note = 2'-deoxy-2'-fluoro ribonucleotide
  modified_base 15..23: mod_base = OTHER; note = 2'-O-methyl ribonucleotide
  modified_base 1..2: mod_base = OTHER; note = phosphorothioate internucleotide linkage
  modified_base 2..3: mod_base = OTHER; note = phosphorothioate internucleotide linkage
  modified_base 21..22: mod_base = OTHER; note = phosphorothioate internucleotide linkage
  modified_base 22..23: mod_base = OTHER; note = phosphorothioate internucleotide linkage
accaagcttggcaagttcttctt

SEQ ID NO: 508 - RNA, 21 nt, Synthetic construct
  source 1..21: mol_type = other RNA
  misc_feature 1: note = monophosphate
  modified_base 1: mod_base = OTHER; note = 2'-O-methyl ribonucleotide
  modified_base 2: mod_base = OTHER; note = 2'-deoxy-2'-fluoro ribonucleotide
  modified_base 3: mod_base = OTHER; note = 2'-O-methyl ribonucleotide
  modified_base 4: mod_base = OTHER; note = 2'-deoxy-2'-fluoro ribonucleotide
  modified_base 5: mod_base = OTHER; note = 2'-O-methyl ribonucleotide
  modified_base 6..7: mod_base = OTHER; note = 2'-deoxy-2'-fluoro ribonucleotide
  modified_base 8..11: mod_base = OTHER; note = 2'-O-methyl ribonucleotide
  modified_base 12: mod_base = OTHER; note = 2'-deoxy-2'-fluoro ribonucleotide
  modified_base 13: mod_base = OTHER; note = 2'-O-methyl ribonucleotide
  modified_base 14: mod_base = OTHER; note = 2'-deoxy-2'-fluoro ribonucleotide
  modified_base 15..21: mod_base = OTHER; note = 2'-O-methyl ribonucleotide
  modified_base 1..2: mod_base = OTHER; note = phosphorothioate internucleotide linkage
  modified_base 2..3: mod_base = OTHER; note = phosphorothioate internucleotide linkage
  modified_base 19..20: mod_base = OTHER; note = phosphorothioate internucleotide linkage
  modified_base 20..21: mod_base = OTHER; note = phosphorothioate internucleotide linkage
aaccaagcttggcaagttctt

SEQ ID NO: 509 - RNA, 23 nt, Synthetic construct
  source 1..23: mol_type = other RNA
  misc_feature 1: note = monophosphate
  modified_base 1: mod_base = OTHER; note = 2'-O-methyl ribonucleotide
  modified_base 2: mod_base = OTHER; note = 2'-deoxy-2'-fluoro ribonucleotide
  modified_base 3: mod_base = OTHER; note = 2'-O-methyl ribonucleotide
  modified_base 4: mod_base = OTHER; note = 2'-deoxy-2'-fluoro ribonucleotide
  modified_base 5: mod_base = OTHER; note = 2'-O-methyl ribonucleotide
  modified_base 6..7: mod_base = OTHER; note = 2'-deoxy-2'-fluoro ribonucleotide
  modified_base 8..11: mod_base = OTHER; note = 2'-O-methyl ribonucleotide
  modified_base 12: mod_base = OTHER; note = 2'-deoxy-2'-fluoro ribonucleotide
  modified_base 13: mod_base = OTHER; note = 2'-O-methyl ribonucleotide
  modified_base 14: mod_base = OTHER; note = 2'-deoxy-2'-fluoro ribonucleotide
  modified_base 15..23: mod_base = OTHER; note = 2'-O-methyl ribonucleotide
  modified_base 1..2: mod_base = OTHER; note = phosphorothioate internucleotide linkage
  modified_base 2..3: mod_base = OTHER; note = phosphorothioate internucleotide linkage
  modified_base 21..22: mod_base = OTHER; note = phosphorothioate internucleotide linkage
  modified_base 22..23: mod_base = OTHER; note = phosphorothioate internucleotide linkage
aaccaagcttggcaagttctttt

SEQ ID NO: 510 - RNA, 21 nt, Synthetic construct
  source 1..21: mol_type = other RNA
  misc_feature 1: note = monophosphate
  modified_base 1: mod_base = OTHER; note = 2'-O-methyl ribonucleotide
  modified_base 2: mod_base = OTHER; note = 2'-deoxy-2'-fluoro ribonucleotide
  modified_base 3: mod_base = OTHER; note = 2'-O-methyl ribonucleotide
  modified_base 4: mod_base = OTHER; note = 2'-deoxy-2'-fluoro ribonucleotide
  modified_base 5: mod_base = OTHER; note = 2'-O-methyl ribonucleotide
  modified_base 6..7: mod_base = OTHER; note = 2'-deoxy-2'-fluoro ribonucleotide
  modified_base 8..11: mod_base = OTHER; note = 2'-O-methyl ribonucleotide
  modified_base 12: mod_base = OTHER; note = 2'-deoxy-2'-fluoro ribonucleotide
  modified_base 13: mod_base = OTHER; note = 2'-O-methyl ribonucleotide
  modified_base 14: mod_base = OTHER; note = 2'-deoxy-2'-fluoro ribonucleotide
  modified_base 15..21: mod_base = OTHER; note = 2'-O-methyl ribonucleotide
  modified_base 1..2: mod_base = OTHER; note = phosphorothioate internucleotide linkage
  modified_base 2..3: mod_base = OTHER; note = phosphorothioate internucleotide linkage
  modified_base 19..20: mod_base = OTHER; note = phosphorothioate internucleotide linkage
  modified_base 20..21: mod_base = OTHER; note = phosphorothioate internucleotide linkage
agtccgactatgctggtgttt

SEQ ID NO: 511 - RNA, 21 nt, Synthetic construct
  source 1..21: mol_type = other RNA
  misc_feature 1: note = monophosphate
  modified_base 1: mod_base = OTHER; note = 2'-O-methyl ribonucleotide
  modified_base 2: mod_base = OTHER; note = 2'-deoxy-2'-fluoro ribonucleotide
  modified_base 3: mod_base = OTHER; note = 2'-O-methyl ribonucleotide
  modified_base 4: mod_base = OTHER; note = 2'-deoxy-2'-fluoro ribonucleotide
  modified_base 5: mod_base = OTHER; note = 2'-O-methyl ribonucleotide
  modified_base 6..7: mod_base = OTHER; note = 2'-deoxy-2'-fluoro ribonucleotide
  modified_base 8..11: mod_base = OTHER; note = 2'-O-methyl ribonucleotide
  modified_base 12: mod_base = OTHER; note = 2'-deoxy-2'-fluoro ribonucleotide
  modified_base 13: mod_base = OTHER; note = 2'-O-methyl ribonucleotide
  modified_base 14: mod_base = OTHER; note = 2'-deoxy-2'-fluoro ribonucleotide
  modified_base 15..21: mod_base = OTHER; note = 2'-O-methyl ribonucleotide
  modified_base 1..2: mod_base = OTHER; note = phosphorothioate internucleotide linkage
  modified_base 2..3: mod_base = OTHER; note = phosphorothioate internucleotide linkage
  modified_base 19..20: mod_base = OTHER; note = phosphorothioate internucleotide linkage
  modified_base 20..21: mod_base = OTHER; note = phosphorothioate internucleotide linkage
aggtccgactatgctggtgtt

SEQ ID NO: 512 - RNA, 21 nt, Synthetic construct
  source 1..21: mol_type = other RNA
  misc_feature 1: note = monophosphate
  modified_base 1: mod_base = OTHER; note = 2'-O-methyl ribonucleotide
  modified_base 2: mod_base = OTHER; note = 2'-deoxy-2'-fluoro ribonucleotide
  modified_base 3: mod_base = OTHER; note = 2'-O-methyl ribonucleotide
  modified_base 4: mod_base = OTHER; note = 2'-deoxy-2'-fluoro ribonucleotide
  modified_base 5: mod_base = OTHER; note = 2'-O-methyl ribonucleotide
  modified_base 6..7: mod_base = OTHER; note = 2'-deoxy-2'-fluoro ribonucleotide
  modified_base 8..11: mod_base = OTHER; note = 2'-O-methyl ribonucleotide
  modified_base 12: mod_base = OTHER; note = 2'-deoxy-2'-fluoro ribonucleotide
  modified_base 13: mod_base = OTHER; note = 2'-O-methyl ribonucleotide
  modified_base 14: mod_base = OTHER; note = 2'-deoxy-2'-fluoro ribonucleotide
  modified_base 15..21: mod_base = OTHER; note = 2'-O-methyl ribonucleotide
  modified_base 1..2: mod_base = OTHER; note = phosphorothioate internucleotide linkage
  modified_base 2..3: mod_base = OTHER; note = phosphorothioate internucleotide linkage
  modified_base 19..20: mod_base = OTHER; note = phosphorothioate internucleotide linkage
  modified_base 20..21: mod_base = OTHER; note = phosphorothioate internucleotide linkage
tggtgtaacaccaagggcgtt

SEQ ID NO: 513 - RNA, 23 nt, Synthetic construct
  source 1..23: mol_type = other RNA
  modified_base 1: mod_base = OTHER; note = 2'-O-methyl ribonucleotide
  modified_base 2: mod_base = OTHER; note = 2'-deoxy-2'-fluoro ribonucleotide
  modified_base 3..6: mod_base = OTHER; note = 2'-O-methyl ribonucleotide
  modified_base 7: mod_base = OTHER; note = 2'-deoxy-2'-fluoro ribonucleotide
  modified_base 8..11: mod_base = OTHER; note = 2'-O-methyl ribonucleotide
  modified_base 12: mod_base = OTHER; note = 2'-deoxy-2'-fluoro ribonucleotide
  modified_base 13: mod_base = OTHER; note = 2'-O-methyl ribonucleotide
  modified_base 14: mod_base = OTHER; note = 2'-deoxy-2'-fluoro ribonucleotide
  modified_base 15..23: mod_base = OTHER; note = 2'-O-methyl ribonucleotide
  modified_base 1..2: mod_base = OTHER; note = phosphorothioate internucleotide linkage
  modified_base 2..3: mod_base = OTHER; note = phosphorothioate internucleotide linkage
  modified_base 21..22: mod_base = OTHER; note = phosphorothioate internucleotide linkage
  modified_base 22..23: mod_base = OTHER; note = phosphorothioate internucleotide linkage
tggtgtaacaccaagggcgaatt

SEQ ID NO: 514 - RNA, 21 nt, Synthetic construct
  source 1..21: mol_type = other RNA
  modified_base 1: mod_base = OTHER; note = 2'-O-methyl ribonucleotide
  modified_base 2: mod_base = OTHER; note = 2'-deoxy-2'-fluoro ribonucleotide
  modified_base 3..6: mod_base = OTHER; note = 2'-O-methyl ribonucleotide
  modified_base 7: mod_base = OTHER; note = 2'-deoxy-2'-fluoro ribonucleotide
  modified_base 8..11: mod_base = OTHER; note = 2'-O-methyl ribonucleotide
  modified_base 12: mod_base = OTHER; note = 2'-deoxy-2'-fluoro ribonucleotide
  modified_base 13: mod_base = OTHER; note = 2'-O-methyl ribonucleotide
  modified_base 14: mod_base = OTHER; note = 2'-deoxy-2'-fluoro ribonucleotide
  modified_base 15..21: mod_base = OTHER; note = 2'-O-methyl ribonucleotide
  modified_base 1..2: mod_base = OTHER; note = phosphorothioate internucleotide linkage
  modified_base 2..3: mod_base = OTHER; note = phosphorothioate internucleotide linkage
  modified_base 19..20: mod_base = OTHER; note = phosphorothioate internucleotide linkage
  modified_base 20..21: mod_base = OTHER; note = phosphorothioate internucleotide linkage
tggtgtaacaccaagggcgtt

SEQ ID NO: 515 - RNA, 21 nt, Synthetic construct
  source 1..21: mol_type = other RNA
  modified_base 1: mod_base = OTHER; note = 2'-O-methyl ribonucleotide
  modified_base 2: mod_base = OTHER; note = 2'-deoxy-2'-fluoro ribonucleotide
  modified_base 3..6: mod_base = OTHER; note = 2'-O-methyl ribonucleotide
  modified_base 7: mod_base = OTHER; note = 2'-deoxy-2'-fluoro ribonucleotide
  modified_base 8..13: mod_base = OTHER; note = 2'-O-methyl ribonucleotide
  modified_base 14: mod_base = OTHER; note = 2'-deoxy-2'-fluoro ribonucleotide
  modified_base 15: mod_base = OTHER; note = 2'-O-methyl ribonucleotide
  modified_base 16: mod_base = OTHER; note = 2'-deoxy-2'-fluoro ribonucleotide
  modified_base 17..21: mod_base = OTHER; note = 2'-O-methyl ribonucleotide
  modified_base 1..2: mod_base = OTHER; note = phosphorothioate internucleotide linkage
  modified_base 2..3: mod_base = OTHER; note = phosphorothioate internucleotide linkage
  modified_base 19..20: mod_base = OTHER; note = phosphorothioate internucleotide linkage
  modified_base 20..21: mod_base = OTHER; note = phosphorothioate internucleotide linkage
tggtgtaacaccaagggcgtt

SEQ ID NO: 516 - RNA, 23 nt, Synthetic construct
  source 1..23: mol_type = other RNA
  modified_base 1: mod_base = OTHER; note = 2'-O-methyl ribonucleotide
  modified_base 2: mod_base = OTHER; note = 2'-deoxy-2'-fluoro ribonucleotide
  modified_base 3: mod_base = OTHER; note = 2'-O-methyl ribonucleotide
  modified_base 4: mod_base = OTHER; note = 2'-deoxy-2'-fluoro ribonucleotide
  modified_base 5: mod_base = OTHER; note = 2'-O-methyl ribonucleotide
  modified_base 6: mod_base = OTHER; note = 2'-deoxy-2'-fluoro ribonucleotide
  modified_base 7..13: mod_base = OTHER; note = 2'-O-methyl ribonucleotide
  modified_base 14: mod_base = OTHER; note = 2'-deoxy-2'-fluoro ribonucleotide
  modified_base 15: mod_base = OTHER; note = 2'-O-methyl ribonucleotide
  modified_base 16: mod_base = OTHER; note = 2'-deoxy-2'-fluoro ribonucleotide
  modified_base 17..23: mod_base = OTHER; note = 2'-O-methyl ribonucleotide
  modified_base 1..2: mod_base = OTHER; note = phosphorothioate internucleotide linkage
  modified_base 2..3: mod_base = OTHER; note = phosphorothioate internucleotide linkage
  modified_base 21..22: mod_base = OTHER; note = phosphorothioate internucleotide linkage
  modified_base 22..23: mod_base = OTHER; note = phosphorothioate internucleotide linkage
tggtgtaacaccaagggcgaatt

SEQ ID NO: 517 - RNA, 23 nt, Synthetic construct
  source 1..23: mol_type = other RNA
  modified_base 1: mod_base = OTHER; note = 2'-O-methyl ribonucleotide
  modified_base 2: mod_base = OTHER; note = 2'-deoxy-2'-fluoro ribonucleotide
  modified_base 3..7: mod_base = OTHER; note = 2'-O-methyl ribonucleotide
  modified_base 8..9: mod_base = OTHER; note = 2'-deoxy-2'-fluoro ribonucleotide
  modified_base 10..13: mod_base = OTHER; note = 2'-O-methyl ribonucleotide
  modified_base 14: mod_base = OTHER; note = 2'-deoxy-2'-fluoro ribonucleotide
  modified_base 15: mod_base = OTHER; note = 2'-O-methyl ribonucleotide
  modified_base 16: mod_base = OTHER; note = 2'-deoxy-2'-fluoro ribonucleotide
  modified_base 17..23: mod_base = OTHER; note = 2'-O-methyl ribonucleotide
  modified_base 1..2: mod_base = OTHER; note = phosphorothioate internucleotide linkage
  modified_base 2..3: mod_base = OTHER; note = phosphorothioate internucleotide linkage
  modified_base 21..22: mod_base = OTHER; note = phosphorothioate internucleotide linkage
  modified_base 22..23: mod_base = OTHER; note = phosphorothioate internucleotide linkage
tggtgtaacaccaagggcgaatt

SEQ ID NO: 518 - RNA, 21 nt, Synthetic construct
  source 1..21: mol_type = other RNA
  misc_feature 1: note = monophosphate
  modified_base 1: mod_base = OTHER; note = 2'-O-methyl ribonucleotide
  modified_base 2: mod_base = OTHER; note = 2'-deoxy-2'-fluoro ribonucleotide
  modified_base 3: mod_base = OTHER; note = 2'-O-methyl ribonucleotide
  modified_base 4: mod_base = OTHER; note = 2'-deoxy-2'-fluoro ribonucleotide
  modified_base 5: mod_base = OTHER; note = 2'-O-methyl ribonucleotide
  modified_base 6..7: mod_base = OTHER; note = 2'-deoxy-2'-fluoro ribonucleotide
  modified_base 8..11: mod_base = OTHER; note = 2'-O-methyl ribonucleotide
  modified_base 12: mod_base = OTHER; note = 2'-deoxy-2'-fluoro ribonucleotide
  modified_base 13: mod_base = OTHER; note = 2'-O-methyl ribonucleotide
  modified_base 14: mod_base = OTHER; note = 2'-deoxy-2'-fluoro ribonucleotide
  modified_base 15..21: mod_base = OTHER; note = 2'-O-methyl ribonucleotide
  modified_base 1..2: mod_base = OTHER; note = phosphorothioate internucleotide linkage
  modified_base 2..3: mod_base = OTHER; note = phosphorothioate internucleotide linkage
  modified_base 19..20: mod_base = OTHER; note = phosphorothioate internucleotide linkage
  modified_base 20..21: mod_base = OTHER; note = phosphorothioate internucleotide linkage
atggtgtaacaccaagggctt

SEQ ID NO: 519 - RNA, 23 nt, Synthetic construct
  source 1..23: mol_type = other RNA
  modified_base 1: mod_base = OTHER; note = 2'-O-methyl ribonucleotide
  modified_base 2: mod_base = OTHER; note = 2'-deoxy-2'-fluoro ribonucleotide
  modified_base 3: mod_base = OTHER; note = 2'-O-methyl ribonucleotide
  modified_base 4: mod_base = OTHER; note = 2'-deoxy-2'-fluoro ribonucleotide
  modified_base 5: mod_base = OTHER; note = 2'-O-methyl ribonucleotide
  modified_base 6: mod_base = OTHER; note = 2'-deoxy-2'-fluoro ribonucleotide
  modified_base 7: mod_base = OTHER; note = 2'-O-methyl ribonucleotide
  modified_base 8..9: mod_base = OTHER; note = 2'-deoxy-2'-fluoro ribonucleotide
  modified_base 10..13: mod_base = OTHER; note = 2'-O-methyl ribonucleotide
  modified_base 14: mod_base = OTHER; note = 2'-deoxy-2'-fluoro ribonucleotide
  modified_base 15: mod_base = OTHER; note = 2'-O-methyl ribonucleotide
  modified_base 16: mod_base = OTHER; note = 2'-deoxy-2'-fluoro ribonucleotide
  modified_base 17..23: mod_base = OTHER; note = 2'-O-methyl ribonucleotide
  modified_base 1..2: mod_base = OTHER; note = phosphorothioate internucleotide linkage
  modified_base 2..3: mod_base = OTHER; note = phosphorothioate internucleotide linkage
  modified_base 21..22: mod_base = OTHER; note = phosphorothioate internucleotide linkage
  modified_base 22..23: mod_base = OTHER; note = phosphorothioate internucleotide linkage
atggtgtaacaccaagggcgatt

SEQ ID NO: 520 - RNA, 23 nt, Synthetic construct
  source 1..23: mol_type = other RNA
  modified_base 1: mod_base = OTHER; note = 2'-O-methyl ribonucleotide
  modified_base 2: mod_base = OTHER; note = 2'-deoxy-2'-fluoro ribonucleotide
  modified_base 3..6: mod_base = OTHER; note = 2'-O-methyl ribonucleotide
  modified_base 7: mod_base = OTHER; note = 2'-deoxy-2'-fluoro ribonucleotide
  modified_base 8..11: mod_base = OTHER; note = 2'-O-methyl ribonucleotide
  modified_base 12: mod_base = OTHER; note = 2'-deoxy-2'-fluoro ribonucleotide
  modified_base 13: mod_base = OTHER; note = 2'-O-methyl ribonucleotide
  modified_base 14: mod_base = OTHER; note = 2'-deoxy-2'-fluoro ribonucleotide
  modified_base 15..23: mod_base = OTHER; note = 2'-O-methyl ribonucleotide
  modified_base 1..2: mod_base = OTHER; note = phosphorothioate internucleotide linkage
  modified_base 2..3: mod_base = OTHER; note = phosphorothioate internucleotide linkage
  modified_base 21..22: mod_base = OTHER; note = phosphorothioate internucleotide linkage
  modified_base 22..23: mod_base = OTHER; note = phosphorothioate internucleotide linkage
atggtgtaacaccaagggcgatt

SEQ ID NO: 521 - RNA, 21 nt, Synthetic construct
  source 1..21: mol_type = other RNA
  modified_base 1: mod_base = OTHER; note = 2'-O-methyl ribonucleotide
  modified_base 2: mod_base = OTHER; note = 2'-deoxy-2'-fluoro ribonucleotide
  modified_base 3..6: mod_base = OTHER; note = 2'-O-methyl ribonucleotide
  modified_base 7: mod_base = OTHER; note = 2'-deoxy-2'-fluoro ribonucleotide
  modified_base 8..11: mod_base = OTHER; note = 2'-O-methyl ribonucleotide
  modified_base 12: mod_base = OTHER; note = 2'-deoxy-2'-fluoro ribonucleotide
  modified_base 13: mod_base = OTHER; note = 2'-O-methyl ribonucleotide
  modified_base 14: mod_base = OTHER; note = 2'-deoxy-2'-fluoro ribonucleotide
  modified_base 15..21: mod_base = OTHER; note = 2'-O-methyl ribonucleotide
  modified_base 1..2: mod_base = OTHER; note = phosphorothioate internucleotide linkage
  modified_base 2..3: mod_base = OTHER; note = phosphorothioate internucleotide linkage
  modified_base 19..20: mod_base = OTHER; note = phosphorothioate internucleotide linkage
  modified_base 20..21: mod_base = OTHER; note = phosphorothioate internucleotide linkage
atggtgtaacaccaagggctt

SEQ ID NO: 522 - RNA, 21 nt, Synthetic construct
  source 1..21: mol_type = other RNA
  misc_feature 1: note = monophosphate
  modified_base 1: mod_base = OTHER; note = 2'-O-methyl ribonucleotide
  modified_base 2: mod_base = OTHER; note = 2'-deoxy-2'-fluoro ribonucleotide
  modified_base 3: mod_base = OTHER; note = 2'-O-methyl ribonucleotide
  modified_base 4: mod_base = OTHER; note = 2'-deoxy-2'-fluoro ribonucleotide
  modified_base 5: mod_base = OTHER; note = 2'-O-methyl ribonucleotide
  modified_base 6..7: mod_base = OTHER; note = 2'-deoxy-2'-fluoro ribonucleotide
  modified_base 8..11: mod_base = OTHER; note = 2'-O-methyl ribonucleotide
  modified_base 12: mod_base = OTHER; note = 2'-deoxy-2'-fluoro ribonucleotide
  modified_base 13: mod_base = OTHER; note = 2'-O-methyl ribonucleotide
  modified_base 14: mod_base = OTHER; note = 2'-deoxy-2'-fluoro ribonucleotide
  modified_base 15..21: mod_base = OTHER; note = 2'-O-methyl ribonucleotide
  modified_base 1..2: mod_base = OTHER; note = phosphorothioate internucleotide linkage
  modified_base 2..3: mod_base = OTHER; note = phosphorothioate internucleotide linkage
  modified_base 19..20: mod_base = OTHER; note = phosphorothioate internucleotide linkage
  modified_base 20..21: mod_base = OTHER; note = phosphorothioate internucleotide linkage
agatccatggtgtaacacctt

SEQ ID NO: 523 - RNA, 21 nt, Synthetic construct
  source 1..21: mol_type = other RNA
  misc_feature 1: note = monophosphate
  modified_base 1: mod_base = OTHER; note = 2'-O-methyl ribonucleotide
  modified_base 2: mod_base = OTHER; note = 2'-deoxy-2'-fluoro ribonucleotide
  modified_base 3: mod_base = OTHER; note = 2'-O-methyl ribonucleotide
  modified_base 4: mod_base = OTHER; note = 2'-deoxy-2'-fluoro ribonucleotide
  modified_base 5: mod_base = OTHER; note = 2'-O-methyl ribonucleotide
  modified_base 6..7: mod_base = OTHER; note = 2'-deoxy-2'-fluoro ribonucleotide
  modified_base 8..11: mod_base = OTHER; note = 2'-O-methyl ribonucleotide
  modified_base 12: mod_base = OTHER; note = 2'-deoxy-2'-fluoro ribonucleotide
  modified_base 13: mod_base = OTHER; note = 2'-O-methyl ribonucleotide
  modified_base 14: mod_base = OTHER; note = 2'-deoxy-2'-fluoro ribonucleotide
  modified_base 15..21: mod_base = OTHER; note = 2'-O-methyl ribonucleotide
  modified_base 1..2: mod_base = OTHER; note = phosphorothioate internucleotide linkage
  modified_base 2..3: mod_base = OTHER; note = phosphorothioate internucleotide linkage
  modified_base 19..20: mod_base = OTHER; note = phosphorothioate internucleotide linkage
  modified_base 20..21: mod_base = OTHER; note = phosphorothioate internucleotide linkage
ttgcaaggacacttgattctt

SEQ ID NO: 524 - RNA, 23 nt, Synthetic construct
  source 1..23: mol_type = other RNA
  modified_base 1: mod_base = OTHER; note = 2'-O-methyl ribonucleotide
  modified_base 2: mod_base = OTHER; note = 2'-deoxy-2'-fluoro ribonucleotide
  modified_base 3: mod_base = OTHER; note = 2'-O-methyl ribonucleotide
  modified_base 4: mod_base = OTHER; note = 2'-deoxy-2'-fluoro ribonucleotide
  modified_base 5: mod_base = OTHER; note = 2'-O-methyl ribonucleotide
  modified_base 6: mod_base = OTHER; note = 2'-deoxy-2'-fluoro ribonucleotide
  modified_base 7: mod_base = OTHER; note = 2'-O-methyl ribonucleotide
  modified_base 8..9: mod_base = OTHER; note = 2'-deoxy-2'-fluoro ribonucleotide
  modified_base 10..13: mod_base = OTHER; note = 2'-O-methyl ribonucleotide
  modified_base 14: mod_base = OTHER; note = 2'-deoxy-2'-fluoro ribonucleotide
  modified_base 15: mod_base = OTHER; note = 2'-O-methyl ribonucleotide
  modified_base 16: mod_base = OTHER; note = 2'-deoxy-2'-fluoro ribonucleotide
  modified_base 17..23: mod_base = OTHER; note = 2'-O-methyl ribonucleotide
  modified_base 1..2: mod_base = OTHER; note = phosphorothioate internucleotide linkage
  modified_base 2..3: mod_base = OTHER; note = phosphorothioate internucleotide linkage
  modified_base 21..22: mod_base = OTHER; note = phosphorothioate internucleotide linkage
  modified_base 22..23: mod_base = OTHER; note = phosphorothioate internucleotide linkage
ttgcaaggacacttgattctgtt

SEQ ID NO: 525 - RNA, 21 nt, Synthetic construct
  source 1..21: mol_type = other RNA
  modified_base 1: mod_base = OTHER; note = 2'-O-methyl ribonucleotide
  modified_base 2: mod_base = OTHER; note = 2'-deoxy-2'-fluoro ribonucleotide
  modified_base 3..6: mod_base = OTHER; note = 2'-O-methyl ribonucleotide
  modified_base 7: mod_base = OTHER; note = 2'-deoxy-2'-fluoro ribonucleotide
  modified_base 8..11: mod_base = OTHER; note = 2'-O-methyl ribonucleotide
  modified_base 12: mod_base = OTHER; note = 2'-deoxy-2'-fluoro ribonucleotide
  modified_base 13: mod_base = OTHER; note = 2'-O-methyl ribonucleotide
  modified_base 14: mod_base = OTHER; note = 2'-deoxy-2'-fluoro ribonucleotide
  modified_base 15..21: mod_base = OTHER; note = 2'-O-methyl ribonucleotide
  modified_base 1..2: mod_base = OTHER; note = phosphorothioate internucleotide linkage
  modified_base 2..3: mod_base = OTHER; note = phosphorothioate internucleotide linkage
  modified_base 19..20: mod_base = OTHER; note = phosphorothioate internucleotide linkage
  modified_base 20..21: mod_base = OTHER; note = phosphorothioate internucleotide linkage
ttgcaaggacacttgattctt

SEQ ID NO: 526 - RNA, 23 nt, Synthetic construct
  source 1..23: mol_type = other RNA
  modified_base 1: mod_base = OTHER; note = 2'-O-methyl ribonucleotide
  modified_base 2: mod_base = OTHER; note = 2'-deoxy-2'-fluoro ribonucleotide
  modified_base 3..6: mod_base = OTHER; note = 2'-O-methyl ribonucleotide
  modified_base 7: mod_base = OTHER; note = 2'-deoxy-2'-fluoro ribonucleotide
  modified_base 8..11: mod_base = OTHER; note = 2'-O-methyl ribonucleotide
  modified_base 12: mod_base = OTHER; note = 2'-deoxy-2'-fluoro ribonucleotide
  modified_base 13: mod_base = OTHER; note = 2'-O-methyl ribonucleotide
  modified_base 14: mod_base = OTHER; note = 2'-deoxy-2'-fluoro ribonucleotide
  modified_base 15..23: mod_base = OTHER; note = 2'-O-methyl ribonucleotide
  modified_base 1..2: mod_base = OTHER; note = phosphorothioate internucleotide linkage
  modified_base 2..3: mod_base = OTHER; note = phosphorothioate internucleotide linkage
  modified_base 21..22: mod_base = OTHER; note = phosphorothioate internucleotide linkage
  modified_base 22..23: mod_base = OTHER; note = phosphorothioate internucleotide linkage
ttgcaaggacacttgattctgtt

SEQ ID NO: 527 - RNA, 21 nt, Synthetic construct
  source 1..21: mol_type = other RNA
  modified_base 1: mod_base = OTHER; note = 2'-O-methyl ribonucleotide
  modified_base 2: mod_base = OTHER; note = 2'-deoxy-2'-fluoro ribonucleotide
  modified_base 3..6: mod_base = OTHER; note = 2'-O-methyl ribonucleotide
  modified_base 7: mod_base = OTHER; note = 2'-deoxy-2'-fluoro ribonucleotide
  modified_base 8..11: mod_base = OTHER; note = 2'-O-methyl ribonucleotide
  modified_base 12: mod_base = OTHER; note = 2'-deoxy-2'-fluoro ribonucleotide
  modified_base 13: mod_base = OTHER; note = 2'-O-methyl ribonucleotide
  modified_base 14: mod_base = OTHER; note = 2'-deoxy-2'-fluoro ribonucleotide
  modified_base 15: mod_base = OTHER; note = 2'-O-methyl ribonucleotide
  modified_base 16: mod_base = OTHER; note = 2'-deoxy-2'-fluoro ribonucleotide
  modified_base 17..21: mod_base = OTHER; note = 2'-O-methyl ribonucleotide
  modified_base 1..2: mod_base = OTHER; note = phosphorothioate internucleotide linkage
  modified_base 2..3: mod_base = OTHER; note = phosphorothioate internucleotide linkage
  modified_base 19..20: mod_base = OTHER; note = phosphorothioate internucleotide linkage
  modified_base 20..21: mod_base = OTHER; note = phosphorothioate internucleotide linkage
ttgcaaggacacttgattctt

SEQ ID NO: 528 - RNA, 21 nt, Synthetic construct
  source 1..21: mol_type = other RNA
  modified_base 1: mod_base = OTHER; note = 2'-O-methyl ribonucleotide
  modified_base 2: mod_base = OTHER; note = 2'-deoxy-2'-fluoro ribonucleotide
  modified_base 3..6: mod_base = OTHER; note = 2'-O-methyl ribonucleotide
  modified_base 7: mod_base = OTHER; note = 2'-deoxy-2'-fluoro ribonucleotide
  modified_base 8..13: mod_base = OTHER; note = 2'-O-methyl ribonucleotide
  modified_base 14: mod_base = OTHER; note = 2'-deoxy-2'-fluoro ribonucleotide
  modified_base 15: mod_base = OTHER; note = 2'-O-methyl ribonucleotide
  modified_base 16: mod_base = OTHER; note = 2'-deoxy-2'-fluoro ribonucleotide
  modified_base 17..21: mod_base = OTHER; note = 2'-O-methyl ribonucleotide
  modified_base 1..2: mod_base = OTHER; note = phosphorothioate internucleotide linkage
  modified_base 2..3: mod_base = OTHER; note = phosphorothioate internucleotide linkage
  modified_base 19..20: mod_base = OTHER; note = phosphorothioate internucleotide linkage
  modified_base 20..21: mod_base = OTHER; note = phosphorothioate internucleotide linkage
ttgcaaggacacttgattctt

SEQ ID NO: 529 - RNA, 23 nt, Synthetic construct
  source 1..23: mol_type = other RNA
  modified_base 1: mod_base = OTHER; note = 2'-O-methyl ribonucleotide
  modified_base 2: mod_base = OTHER; note = 2'-deoxy-2'-fluoro ribonucleotide
  modified_base 3..6: mod_base = OTHER; note = 2'-O-methyl ribonucleotide
  modified_base 7: mod_base = OTHER; note = 2'-deoxy-2'-fluoro ribonucleotide
  modified_base 8..13: mod_base = OTHER; note = 2'-O-methyl ribonucleotide
  modified_base 14: mod_base = OTHER; note = 2'-deoxy-2'-fluoro ribonucleotide
  modified_base 15: mod_base = OTHER; note = 2'-O-methyl ribonucleotide
  modified_base 16: mod_base = OTHER; note = 2'-deoxy-2'-fluoro ribonucleotide
  modified_base 17..23: mod_base = OTHER; note = 2'-O-methyl ribonucleotide
  modified_base 1..2: mod_base = OTHER; note = phosphorothioate internucleotide linkage
  modified_base 2..3: mod_base = OTHER; note = phosphorothioate internucleotide linkage
  modified_base 21..22: mod_base = OTHER; note = phosphorothioate internucleotide linkage
  modified_base 22..23: mod_base = OTHER; note = phosphorothioate internucleotide linkage
ttgcaaggacacttgattctgtt

SEQ ID NO: 530 - RNA, 21 nt, Synthetic construct
  source 1..21: mol_type = other RNA
  modified_base 1: mod_base = OTHER; note = 2'-O-methyl ribonucleotide
  modified_base 2: mod_base = OTHER; note = 2'-deoxy-2'-fluoro ribonucleotide
  modified_base 3..6: mod_base = OTHER; note = 2'-O-methyl ribonucleotide
  modified_base 7: mod_base = OTHER; note = 2'-deoxy-2'-fluoro ribonucleotide
  modified_base 8..11: mod_base = OTHER; note = 2'-O-methyl ribonucleotide
  modified_base 12: mod_base = OTHER; note = 2'-deoxy-2'-fluoro ribonucleotide
  modified_base 13: mod_base = OTHER; note = 2'-O-methyl ribonucleotide
  modified_base 14: mod_base = OTHER; note = 2'-deoxy-2'-fluoro ribonucleotide
  modified_base 15..21: mod_base = OTHER; note = 2'-O-methyl ribonucleotide
  modified_base 1..2: mod_base = OTHER; note = phosphorothioate internucleotide linkage
  modified_base 2..3: mod_base = OTHER; note = phosphorothioate internucleotide linkage
  modified_base 19..20: mod_base = OTHER; note = phosphorothioate internucleotide linkage
  modified_base 20..21: mod_base = OTHER; note = phosphorothioate internucleotide linkage
ttgcaaggacacttgattctg

SEQ ID NO: 531 - RNA, 21 nt, Synthetic construct
  source 1..21: mol_type = other RNA
  modified_base 1: mod_base = OTHER; note = 2'-O-methyl ribonucleotide
  modified_base 2: mod_base = OTHER; note = 2'-deoxy-2'-fluoro ribonucleotide
  modified_base 3: mod_base = OTHER; note = 2'-O-methyl ribonucleotide
  modified_base 4: mod_base = OTHER; note = 2'-deoxy-2'-fluoro ribonucleotide
  modified_base 5: mod_base = OTHER; note = 2'-O-methyl ribonucleotide
  modified_base 6: mod_base = OTHER; note = 2'-deoxy-2'-fluoro ribonucleotide
  modified_base 7..11: mod_base = OTHER; note = 2'-O-methyl ribonucleotide
  modified_base 12: mod_base = OTHER; note = 2'-deoxy-2'-fluoro ribonucleotide
  modified_base 13: mod_base = OTHER; note = 2'-O-methyl ribonucleotide
  modified_base 14: mod_base = OTHER; note = 2'-deoxy-2'-fluoro ribonucleotide
  modified_base 15: mod_base = OTHER; note = 2'-O-methyl ribonucleotide
  modified_base 16: mod_base = OTHER; note = 2'-deoxy-2'-fluoro ribonucleotide
  modified_base 17..21: mod_base = OTHER; note = 2'-O-methyl ribonucleotide
  modified_base 1..2: mod_base = OTHER; note = phosphorothioate internucleotide linkage
  modified_base 2..3: mod_base = OTHER; note = phosphorothioate internucleotide linkage
  modified_base 19..20: mod_base = OTHER; note = phosphorothioate internucleotide linkage
  modified_base 20..21: mod_base = OTHER; note = phosphorothioate internucleotide linkage
ttgcaaggacacttgattctg

SEQ ID NO: 532 - RNA, 21 nt, Synthetic construct
  source 1..21: mol_type = other RNA
  misc_feature 1: note = monophosphate
  modified_base 1: mod_base = OTHER; note = 2'-O-methyl ribonucleotide
  modified_base 2: mod_base = OTHER; note = 2'-deoxy-2'-fluoro ribonucleotide
  modified_base 3: mod_base = OTHER; note = 2'-O-methyl ribonucleotide
  modified_base 4: mod_base = OTHER; note = 2'-deoxy-2'-fluoro ribonucleotide
  modified_base 5: mod_base = OTHER; note = 2'-O-methyl ribonucleotide
  modified_base 6..7: mod_base = OTHER; note = 2'-deoxy-2'-fluoro ribonucleotide
  modified_base 8..11: mod_base = OTHER; note = 2'-O-methyl ribonucleotide
  modified_base 12: mod_base = OTHER; note = 2'-deoxy-2'-fluoro ribonucleotide
  modified_base 13: mod_base = OTHER; note = 2'-O-methyl ribonucleotide
  modified_base 14: mod_base = OTHER; note = 2'-deoxy-2'-fluoro ribonucleotide
  modified_base 15..21: mod_base = OTHER; note = 2'-O-methyl ribonucleotide
  modified_base 1..2: mod_base = OTHER; note = phosphorothioate internucleotide linkage
  modified_base 2..3: mod_base = OTHER; note = phosphorothioate internucleotide linkage
  modified_base 19..20: mod_base = OTHER; note = phosphorothioate internucleotide linkage
  modified_base 20..21: mod_base = OTHER; note = phosphorothioate internucleotide linkage
gttgcaaggacacttgatttt

SEQ ID NO: 533 - RNA, 21 nt, Synthetic construct
  source 1..21: mol_type = other RNA
  misc_feature 1: note = monophosphate
  modified_base 1: mod_base = OTHER; note = 2'-O-methyl ribonucleotide
  modified_base 2: mod_base = OTHER; note = 2'-deoxy-2'-fluoro ribonucleotide
  modified_base 3: mod_base = OTHER; note = 2'-O-methyl ribonucleotide
  modified_base 4: mod_base = OTHER; note = 2'-deoxy-2'-fluoro ribonucleotide
  modified_base 5: mod_base = OTHER; note = 2'-O-methyl ribonucleotide
  modified_base 6..7: mod_base = OTHER; note = 2'-deoxy-2'-fluoro ribonucleotide
  modified_base 8..11: mod_base = OTHER; note = 2'-O-methyl ribonucleotide
  modified_base 12: mod_base = OTHER; note = 2'-deoxy-2'-fluoro ribonucleotide
  modified_base 13: mod_base = OTHER; note = 2'-O-methyl ribonucleotide
  modified_base 14: mod_base = OTHER; note = 2'-deoxy-2'-fluoro ribonucleotide
  modified_base 15..21: mod_base = OTHER; note = 2'-O-methyl ribonucleotide
  modified_base 1..2: mod_base = OTHER; note = phosphorothioate internucleotide linkage
  modified_base 2..3: mod_base = OTHER; note = phosphorothioate internucleotide linkage
  modified_base 19..20: mod_base = OTHER; note = phosphorothioate internucleotide linkage
  modified_base 20..21: mod_base = OTHER; note = phosphorothioate internucleotide linkage
attgcaaggacacttgatttt

SEQ ID NO: 534 - RNA, 23 nt, Synthetic construct
  source 1..23: mol_type = other RNA
  modified_base 1: mod_base = OTHER; note = 2'-O-methyl ribonucleotide
  modified_base 2: mod_base = OTHER; note = 2'-deoxy-2'-fluoro ribonucleotide
  modified_base 3: mod_base = OTHER; note = 2'-O-methyl ribonucleotide
  modified_base 4: mod_base = OTHER; note = 2'-deoxy-2'-fluoro ribonucleotide
  modified_base 5: mod_base = OTHER; note = 2'-O-methyl ribonucleotide
  modified_base 6..7: mod_base = OTHER; note = 2'-deoxy-2'-fluoro ribonucleotide
  modified_base 8..11: mod_base = OTHER; note = 2'-O-methyl ribonucleotide
  modified_base 12: mod_base = OTHER; note = 2'-deoxy-2'-fluoro ribonucleotide
  modified_base 13: mod_base = OTHER; note = 2'-O-methyl ribonucleotide
  modified_base 14: mod_base = OTHER; note = 2'-deoxy-2'-fluoro ribonucleotide
  modified_base 15..23: mod_base = OTHER; note = 2'-O-methyl ribonucleotide
  modified_base 1..2: mod_base = OTHER; note = phosphorothioate internucleotide linkage
  modified_base 2..3: mod_base = OTHER; note = phosphorothioate internucleotide linkage
  modified_base 21..22: mod_base = OTHER; note = phosphorothioate internucleotide linkage
  modified_base 22..23: mod_base = OTHER; note = phosphorothioate internucleotide linkage
attgcaaggacacttgattcttt

SEQ ID NO: 535 - RNA, 23 nt, Synthetic construct
  source 1..23: mol_type = other RNA
  modified_base 1: mod_base = OTHER; note = 2'-O-methyl ribonucleotide
  modified_base 2: mod_base = OTHER; note = 2'-deoxy-2'-fluoro ribonucleotide
  modified_base 3..6: mod_base = OTHER; note = 2'-O-methyl ribonucleotide
  modified_base 7: mod_base = OTHER; note = 2'-deoxy-2'-fluoro ribonucleotide
  modified_base 8..11: mod_base = OTHER; note = 2'-O-methyl ribonucleotide
  modified_base 12: mod_base = OTHER; note = 2'-deoxy-2'-fluoro ribonucleotide
  modified_base 13: mod_base = OTHER; note = 2'-O-methyl ribonucleotide
  modified_base 14: mod_base = OTHER; note = 2'-deoxy-2'-fluoro ribonucleotide
  modified_base 15..23: mod_base = OTHER; note = 2'-O-methyl ribonucleotide
  modified_base 1..2: mod_base = OTHER; note = phosphorothioate internucleotide linkage
  modified_base 2..3: mod_base = OTHER; note = phosphorothioate internucleotide linkage
  modified_base 21..22: mod_base = OTHER; note = phosphorothioate internucleotide linkage
  modified_base 22..23: mod_base = OTHER; note = phosphorothioate internucleotide linkage
attgcaaggacacttgattcttt

SEQ ID NO: 536 - RNA, 21 nt, Synthetic construct
  source 1..21: mol_type = other RNA
  modified_base 1: mod_base = OTHER; note = 2'-O-methyl ribonucleotide
  modified_base 2: mod_base = OTHER; note = 2'-deoxy-2'-fluoro ribonucleotide
  modified_base 3..6: mod_base = OTHER; note = 2'-O-methyl ribonucleotide
  modified_base 7: mod_base = OTHER; note = 2'-deoxy-2'-fluoro ribonucleotide
  modified_base 8..11: mod_base = OTHER; note = 2'-O-methyl ribonucleotide
  modified_base 12: mod_base = OTHER; note = 2'-deoxy-2'-fluoro ribonucleotide
  modified_base 13: mod_base = OTHER; note = 2'-O-methyl ribonucleotide
  modified_base 14: mod_base = OTHER; note = 2'-deoxy-2'-fluoro ribonucleotide
  modified_base 15..21: mod_base = OTHER; note = 2'-O-methyl ribonucleotide
  modified_base 1..2: mod_base = OTHER; note = phosphorothioate internucleotide linkage
  modified_base 2..3: mod_base = OTHER; note = phosphorothioate internucleotide linkage
  modified_base 19..20: mod_base = OTHER; note = phosphorothioate internucleotide linkage
  modified_base 20..21: mod_base = OTHER; note = phosphorothioate internucleotide linkage
attgcaaggacacttgatttt

SEQ ID NO: 537 - RNA, 21 nt, Synthetic construct
  source 1..21: mol_type = other RNA
  modified_base 1: mod_base = OTHER; note = 2'-O-methyl ribonucleotide
  modified_base 2: mod_base = OTHER; note = 2'-deoxy-2'-fluoro ribonucleotide
  modified_base 3..6: mod_base = OTHER; note = 2'-O-methyl ribonucleotide
  modified_base 7: mod_base = OTHER; note = 2'-deoxy-2'-fluoro ribonucleotide
  modified_base 8..11: mod_base = OTHER; note = 2'-O-methyl ribonucleotide
  modified_base 12: mod_base = OTHER; note = 2'-deoxy-2'-fluoro ribonucleotide
  modified_base 13: mod_base = OTHER; note = 2'-O-methyl ribonucleotide
  modified_base 14: mod_base = OTHER; note = 2'-deoxy-2'-fluoro ribonucleotide
  modified_base 15: mod_base = OTHER; note = 2'-O-methyl ribonucleotide
  modified_base 16: mod_base = OTHER; note = 2'-deoxy-2'-fluoro ribonucleotide
  modified_base 17..21: mod_base = OTHER; note = 2'-O-methyl ribonucleotide
  modified_base 1..2: mod_base = OTHER; note = phosphorothioate internucleotide linkage
  modified_base 2..3: mod_base = OTHER; note = phosphorothioate internucleotide linkage
  modified_base 19..20: mod_base = OTHER; note = phosphorothioate internucleotide linkage
  modified_base 20..21: mod_base = OTHER; note = phosphorothioate internucleotide linkage
attgcaaggacacttgatttt

SEQ ID NO: 538 - RNA, 23 nt, Synthetic construct
  source 1..23: mol_type = other RNA
  modified_base 1: mod_base = OTHER; note = 2'-O-methyl ribonucleotide
  modified_base 2: mod_base = OTHER; note = 2'-deoxy-2'-fluoro ribonucleotide
  modified_base 3..6: mod_base = OTHER; note = 2'-O-methyl ribonucleotide
  modified_base 7: mod_base = OTHER; note = 2'-deoxy-2'-fluoro ribonucleotide
  modified_base 8..11: mod_base = OTHER; note = 2'-O-methyl ribonucleotide
  modified_base 12: mod_base = OTHER; note = 2'-deoxy-2'-fluoro ribonucleotide
  modified_base 13: mod_base = OTHER; note = 2'-O-methyl ribonucleotide
  modified_base 14: mod_base = OTHER; note = 2'-deoxy-2'-fluoro ribonucleotide
  modified_base 15: mod_base = OTHER; note = 2'-O-methyl ribonucleotide
  modified_base 16: mod_base = OTHER; note = 2'-deoxy-2'-fluoro ribonucleotide
  modified_base 17..23: mod_base = OTHER; note = 2'-O-methyl ribonucleotide
  modified_base 1..2: mod_base = OTHER; note = phosphorothioate internucleotide linkage
  modified_base 2..3: mod_base = OTHER; note = phosphorothioate internucleotide linkage
  modified_base 21..22: mod_base = OTHER; note = phosphorothioate internucleotide linkage
  modified_base 22..23: mod_base = OTHER; note = phosphorothioate internucleotide linkage
attgcaaggacacttgattcttt

SEQ ID NO: 539 - RNA, 21 nt, Synthetic construct
  source 1..21: mol_type = other RNA
  modified_base 1: mod_base = OTHER; note = 2'-O-methyl ribonucleotide
  modified_base 2: mod_base = OTHER; note = 2'-deoxy-2'-fluoro ribonucleotide
  modified_base 3..6: mod_base = OTHER; note = 2'-O-methyl ribonucleotide
  modified_base 7: mod_base = OTHER; note = 2'-deoxy-2'-fluoro ribonucleotide
  modified_base 8..13: mod_base = OTHER; note = 2'-O-methyl ribonucleotide
  modified_base 14: mod_base = OTHER; note = 2'-deoxy-2'-fluoro ribonucleotide
  modified_base 15: mod_base = OTHER; note = 2'-O-methyl ribonucleotide
  modified_base 16: mod_base = OTHER; note = 2'-deoxy-2'-fluoro ribonucleotide
  modified_base 17..21: mod_base = OTHER; note = 2'-O-methyl ribonucleotide
  modified_base 1..2: mod_base = OTHER; note = phosphorothioate internucleotide linkage
  modified_base 2..3: mod_base = OTHER; note = phosphorothioate internucleotide linkage
  modified_base 19..20: mod_base = OTHER; note = phosphorothioate internucleotide linkage
  modified_base 20..21: mod_base = OTHER; note = phosphorothioate internucleotide linkage
attgcaaggacacttgatttt

SEQ ID NO: 540 - RNA, 21 nt, Synthetic construct
  source 1..21: mol_type = other RNA
  modified_base 1: mod_base = OTHER; note = 2'-O-methyl ribonucleotide
  modified_base 2: mod_base = OTHER; note = 2'-deoxy-2'-fluoro ribonucleotide
  modified_base 3..6: mod_base = OTHER; note = 2'-O-methyl ribonucleotide
  modified_base 7: mod_base = OTHER; note = 2'-deoxy-2'-fluoro ribonucleotide
  modified_base 8..11: mod_base = OTHER; note = 2'-O-methyl ribonucleotide
  modified_base 12: mod_base = OTHER; note = 2'-deoxy-2'-fluoro ribonucleotide
  modified_base 13: mod_base = OTHER; note = 2'-O-methyl ribonucleotide
  modified_base 14: mod_base = OTHER; note = 2'-deoxy-2'-fluoro ribonucleotide
  modified_base 15..21: mod_base = OTHER; note = 2'-O-methyl ribonucleotide
  modified_base 1..2: mod_base = OTHER; note = phosphorothioate internucleotide linkage
  modified_base 2..3: mod_base = OTHER; note = phosphorothioate internucleotide linkage
  modified_base 19..20: mod_base = OTHER; note = phosphorothioate internucleotide linkage
  modified_base 20..21: mod_base = OTHER; note = phosphorothioate internucleotide linkage
attgcaaggacacttgattct

SEQ ID NO: 541 - RNA, 21 nt, Synthetic construct
  source 1..21: mol_type = other RNA
  modified_base 1: mod_base = OTHER; note = 2'-O-methyl ribonucleotide
  modified_base 2: mod_base = OTHER; note = 2'-deoxy-2'-fluoro ribonucleotide
  modified_base 3: mod_base = OTHER; note = 2'-O-methyl ribonucleotide
  modified_base 4: mod_base = OTHER; note = 2'-deoxy-2'-fluoro ribonucleotide
  modified_base 5: mod_base = OTHER; note = 2'-O-methyl ribonucleotide
  modified_base 6: mod_base = OTHER; note = 2'-deoxy-2'-fluoro ribonucleotide
  modified_base 7..11: mod_base = OTHER; note = 2'-O-methyl ribonucleotide
  modified_base 12: mod_base = OTHER; note = 2'-deoxy-2'-fluoro ribonucleotide
  modified_base 13: mod_base = OTHER; note = 2'-O-methyl ribonucleotide
  modified_base 14: mod_base = OTHER; note = 2'-deoxy-2'-fluoro ribonucleotide
  modified_base 15: mod_base = OTHER; note = 2'-O-methyl ribonucleotide
  modified_base 16: mod_base = OTHER; note = 2'-deoxy-2'-fluoro ribonucleotide
  modified_base 17..21: mod_base = OTHER; note = 2'-O-methyl ribonucleotide
  modified_base 1..2: mod_base = OTHER; note = phosphorothioate internucleotide linkage
  modified_base 2..3: mod_base = OTHER; note = phosphorothioate internucleotide linkage
  modified_base 19..20: mod_base = OTHER; note = phosphorothioate internucleotide linkage
  modified_base 20..21: mod_base = OTHER; note = phosphorothioate internucleotide linkage
attgcaaggacacttgattct

SEQ ID NO: 542 - RNA, 21 nt, Synthetic construct
  source 1..21: mol_type = other RNA
  misc_feature 1: note = monophosphate
  modified_base 1: mod_base = OTHER; note = 2'-O-methyl ribonucleotide
  modified_base 2: mod_base = OTHER; note = 2'-deoxy-2'-fluoro ribonucleotide
  modified_base 3: mod_base = OTHER; note = 2'-O-methyl ribonucleotide
  modified_base 4: mod_base = OTHER; note = 2'-deoxy-2'-fluoro ribonucleotide
  modified_base 5: mod_base = OTHER; note = 2'-O-methyl ribonucleotide
  modified_base 6..7: mod_base = OTHER; note = 2'-deoxy-2'-fluoro ribonucleotide
  modified_base 8..11: mod_base = OTHER; note = 2'-O-methyl ribonucleotide
  modified_base 12: mod_base = OTHER; note = 2'-deoxy-2'-fluoro ribonucleotide
  modified_base 13: mod_base = OTHER; note = 2'-O-methyl ribonucleotide
  modified_base 14: mod_base = OTHER; note = 2'-deoxy-2'-fluoro ribonucleotide
  modified_base 15..21: mod_base = OTHER; note = 2'-O-methyl ribonucleotide
  modified_base 1..2: mod_base = OTHER; note = phosphorothioate internucleotide linkage
  modified_base 2..3: mod_base = OTHER; note = phosphorothioate internucleotide linkage
  modified_base 19..20: mod_base = OTHER; note = phosphorothioate internucleotide linkage
  modified_base 20..21: mod_base = OTHER; note = phosphorothioate internucleotide linkage
aagttgcaaggacacttgatt

SEQ ID NO: 543 - RNA, 21 nt, Synthetic construct
  source 1..21: mol_type = other RNA
  misc_feature 1: note = monophosphate
  modified_base 1: mod_base = OTHER; note = 2'-O-methyl ribonucleotide
  modified_base 2: mod_base = OTHER; note = 2'-deoxy-2'-fluoro ribonucleotide
  modified_base 3: mod_base = OTHER; note = 2'-O-methyl ribonucleotide
  modified_base 4: mod_base = OTHER; note = 2'-deoxy-2'-fluoro ribonucleotide
  modified_base 5: mod_base = OTHER; note = 2'-O-methyl ribonucleotide
  modified_base 6..7: mod_base = OTHER; note = 2'-deoxy-2'-fluoro ribonucleotide
  modified_base 8..11: mod_base = OTHER; note = 2'-O-methyl ribonucleotide
  modified_base 12: mod_base = OTHER; note = 2'-deoxy-2'-fluoro ribonucleotide
  modified_base 13: mod_base = OTHER; note = 2'-O-methyl ribonucleotide
  modified_base 14: mod_base = OTHER; note = 2'-deoxy-2'-fluoro ribonucleotide
  modified_base 15..21: mod_base = OTHER; note = 2'-O-methyl ribonucleotide
  modified_base 1..2: mod_base = OTHER; note = phosphorothioate internucleotide linkage
  modified_base 2..3: mod_base = OTHER; note = phosphorothioate internucleotide linkage
  modified_base 19..20: mod_base = OTHER; note = phosphorothioate internucleotide linkage
  modified_base 20..21: mod_base = OTHER; note = phosphorothioate internucleotide linkage
attggtgcttcttcagaagtt

SEQ ID NO: 544 - RNA, 21 nt, Synthetic construct
  source 1..21: mol_type = other RNA
  misc_feature 1: note = monophosphate
  modified_base 1: mod_base = OTHER; note = 2'-O-methyl ribonucleotide
  modified_base 2: mod_base = OTHER; note = 2'-deoxy-2'-fluoro ribonucleotide
  modified_base 3: mod_base = OTHER; note = 2'-O-methyl ribonucleotide
  modified_base 4: mod_base = OTHER; note = 2'-deoxy-2'-fluoro ribonucleotide
  modified_base 5: mod_base = OTHER; note = 2'-O-methyl ribonucleotide
  modified_base 6..7: mod_base = OTHER; note = 2'-deoxy-2'-fluoro ribonucleotide
  modified_base 8..11: mod_base = OTHER; note = 2'-O-methyl ribonucleotide
  modified_base 12: mod_base = OTHER; note = 2'-deoxy-2'-fluoro ribonucleotide
  modified_base 13: mod_base = OTHER; note = 2'-O-methyl ribonucleotide
  modified_base 14: mod_base = OTHER; note = 2'-deoxy-2'-fluoro ribonucleotide
  modified_base 15..21: mod_base = OTHER; note = 2'-O-methyl ribonucleotide
  modified_base 1..2: mod_base = OTHER; note = phosphorothioate internucleotide linkage
  modified_base 2..3: mod_base = OTHER; note = phosphorothioate internucleotide linkage
  modified_base 19..20: mod_base = OTHER; note = phosphorothioate internucleotide linkage
  modified_base 20..21: mod_base = OTHER; note = phosphorothioate internucleotide linkage
tgttggtgcttcttcagaatt

SEQ ID NO: 545 - RNA, 21 nt, Synthetic construct
  source 1..21: mol_type = other RNA
  misc_feature 1: note = monophosphate
  modified_base 1: mod_base = OTHER; note = 2'-O-methyl ribonucleotide
  modified_base 2: mod_base = OTHER; note = 2'-deoxy-2'-fluoro ribonucleotide
  modified_base 3: mod_base = OTHER; note = 2'-O-methyl ribonucleotide
  modified_base 4: mod_base = OTHER; note = 2'-deoxy-2'-fluoro ribonucleotide
  modified_base 5: mod_base = OTHER; note = 2'-O-methyl ribonucleotide
  modified_base 6..7: mod_base = OTHER; note = 2'-deoxy-2'-fluoro ribonucleotide
  modified_base 8..11: mod_base = OTHER; note = 2'-O-methyl ribonucleotide
  modified_base 12: mod_base = OTHER; note = 2'-deoxy-2'-fluoro ribonucleotide
  modified_base 13: mod_base = OTHER; note = 2'-O-methyl ribonucleotide
  modified_base 14: mod_base = OTHER; note = 2'-deoxy-2'-fluoro ribonucleotide
  modified_base 15..21: mod_base = OTHER; note = 2'-O-methyl ribonucleotide
  modified_base 1..2: mod_base = OTHER; note = phosphorothioate internucleotide linkage
  modified_base 2..3: mod_base = OTHER; note = phosphorothioate internucleotide linkage
  modified_base 19..20: mod_base = OTHER; note = phosphorothioate internucleotide linkage
  modified_base 20..21: mod_base = OTHER; note = phosphorothioate internucleotide linkage
atgtcatagaggaccaagatt

SEQ ID NO: 546 - RNA, 23 nt, Synthetic construct
  source 1..23: mol_type = other RNA
  modified_base 1: mod_base = OTHER; note = 2'-O-methyl ribonucleotide
  modified_base 2: mod_base = OTHER; note = 2'-deoxy-2'-fluoro ribonucleotide
  modified_base 3: mod_base = OTHER; note = 2'-O-methyl ribonucleotide
  modified_base 4: mod_base = OTHER; note = 2'-deoxy-2'-fluoro ribonucleotide
  modified_base 5: mod_base = OTHER; note = 2'-O-methyl ribonucleotide
  modified_base 6: mod_base = OTHER; note = 2'-deoxy-2'-fluoro ribonucleotide
  modified_base 7: mod_base = OTHER; note = 2'-O-methyl ribonucleotide
  modified_base 8..9: mod_base = OTHER; note = 2'-deoxy-2'-fluoro ribonucleotide
  modified_base 10..13: mod_base = OTHER; note = 2'-O-methyl ribonucleotide
  modified_base 14: mod_base = OTHER; note = 2'-deoxy-2'-fluoro ribonucleotide
  modified_base 15: mod_base = OTHER; note = 2'-O-methyl ribonucleotide
  modified_base 16: mod_base = OTHER; note = 2'-deoxy-2'-fluoro ribonucleotide
  modified_base 17..23: mod_base = OTHER; note = 2'-O-methyl ribonucleotide
  modified_base 1..2: mod_base = OTHER; note = phosphorothioate internucleotide linkage
  modified_base 2..3: mod_base = OTHER; note = phosphorothioate internucleotide linkage
  modified_base 21..22: mod_base = OTHER; note = phosphorothioate internucleotide linkage
  modified_base 22..23: mod_base = OTHER; note = phosphorothioate internucleotide linkage
atgtcatagaggaccaagacttt

SEQ ID NO: 547 - RNA, 23 nt, Synthetic construct
  source 1..23: mol_type = other RNA
  modified_base 1: mod_base = OTHER; note = 2'-O-methyl ribonucleotide
  modified_base 2: mod_base = OTHER; note = 2'-deoxy-2'-fluoro ribonucleotide
  modified_base 3..6: mod_base = OTHER; note = 2'-O-methyl ribonucleotide
  modified_base 7: mod_base = OTHER; note = 2'-deoxy-2'-fluoro ribonucleotide
  modified_base 8..11: mod_base = OTHER; note = 2'-O-methyl ribonucleotide
  modified_base 12: mod_base = OTHER; note = 2'-deoxy-2'-fluoro ribonucleotide
  modified_base 13: mod_base = OTHER; note = 2'-O-methyl ribonucleotide
  modified_base 14: mod_base = OTHER; note = 2'-deoxy-2'-fluoro ribonucleotide
  modified_base 15..23: mod_base = OTHER; note = 2'-O-methyl ribonucleotide
  modified_base 1..2: mod_base = OTHER; note = phosphorothioate internucleotide linkage
  modified_base 2..3: mod_base = OTHER; note = phosphorothioate internucleotide linkage
  modified_base 21..22: mod_base = OTHER; note = phosphorothioate internucleotide linkage
  modified_base 22..23: mod_base = OTHER; note = phosphorothioate internucleotide linkage
atgtcatagaggaccaagacttt

SEQ ID NO: 548 - RNA, 21 nt, Synthetic construct
  source 1..21: mol_type = other RNA
  modified_base 1: mod_base = OTHER; note = 2'-O-methyl ribonucleotide
  modified_base 2: mod_base = OTHER; note = 2'-deoxy-2'-fluoro ribonucleotide
  modified_base 3..6: mod_base = OTHER; note = 2'-O-methyl ribonucleotide
  modified_base 7: mod_base = OTHER; note = 2'-deoxy-2'-fluoro ribonucleotide
  modified_base 8..11: mod_base = OTHER; note = 2'-O-methyl ribonucleotide
  modified_base 12: mod_base = OTHER; note = 2'-deoxy-2'-fluoro ribonucleotide
  modified_base 13: mod_base = OTHER; note = 2'-O-methyl ribonucleotide
  modified_base 14: mod_base = OTHER; note = 2'-deoxy-2'-fluoro ribonucleotide
  modified_base 15..21: mod_base = OTHER; note = 2'-O-methyl ribonucleotide
  modified_base 1..2: mod_base = OTHER; note = phosphorothioate internucleotide linkage
  modified_base 2..3: mod_base = OTHER; note = phosphorothioate internucleotide linkage
  modified_base 19..20: mod_base = OTHER; note = phosphorothioate internucleotide linkage
  modified_base 20..21: mod_base = OTHER; note = phosphorothioate internucleotide linkage
atgtcatagaggaccaagatt

SEQ ID NO: 549 - RNA, 21 nt, Synthetic construct
  source 1..21: mol_type = other RNA
  modified_base 1: mod_base = OTHER; note = 2'-O-methyl ribonucleotide
  modified_base 2: mod_base = OTHER; note = 2'-deoxy-2'-fluoro ribonucleotide
  modified_base 3..6: mod_base = OTHER; note = 2'-O-methyl ribonucleotide
  modified_base 7: mod_base = OTHER; note = 2'-deoxy-2'-fluoro ribonucleotide
  modified_base 8..13: mod_base = OTHER; note = 2'-O-methyl ribonucleotide
  modified_base 14: mod_base = OTHER; note = 2'-deoxy-2'-fluoro ribonucleotide
  modified_base 15: mod_base = OTHER; note = 2'-O-methyl ribonucleotide
  modified_base 16: mod_base = OTHER; note = 2'-deoxy-2'-fluoro ribonucleotide
  modified_base 17..21: mod_base = OTHER; note = 2'-O-methyl ribonucleotide
  modified_base 1..2: mod_base = OTHER; note = phosphorothioate internucleotide linkage
  modified_base 2..3: mod_base = OTHER; note = phosphorothioate internucleotide linkage
  modified_base 19..20: mod_base = OTHER; note = phosphorothioate internucleotide linkage
  modified_base 20..21: mod_base = OTHER; note = phosphorothioate internucleotide linkage
atgtcatagaggaccaagatt

SEQ ID NO: 550 - RNA, 23 nt, Synthetic construct
  source 1..23: mol_type = other RNA
  modified_base 1: mod_base = OTHER; note = 2'-O-methyl ribonucleotide
  modified_base 2: mod_base = OTHER; note = 2'-deoxy-2'-fluoro ribonucleotide
  modified_base 3: mod_base = OTHER; note = 2'-O-methyl ribonucleotide
  modified_base 4: mod_base = OTHER; note = 2'-deoxy-2'-fluoro ribonucleotide
  modified_base 5: mod_base = OTHER; note = 2'-O-methyl ribonucleotide
  modified_base 6: mod_base = OTHER; note = 2'-deoxy-2'-fluoro ribonucleotide
  modified_base 7..13: mod_base = OTHER; note = 2'-O-methyl ribonucleotide
  modified_base 14: mod_base = OTHER; note = 2'-deoxy-2'-fluoro ribonucleotide
  modified_base 15: mod_base = OTHER; note = 2'-O-methyl ribonucleotide
  modified_base 16: mod_base = OTHER; note = 2'-deoxy-2'-fluoro ribonucleotide
  modified_base 17..23: mod_base = OTHER; note = 2'-O-methyl ribonucleotide
  modified_base 1..2: mod_base = OTHER; note = phosphorothioate internucleotide linkage
  modified_base 2..3: mod_base = OTHER; note = phosphorothioate internucleotide linkage
  modified_base 21..22: mod_base = OTHER; note = phosphorothioate internucleotide linkage
  modified_base 22..23: mod_base = OTHER; note = phosphorothioate internucleotide linkage
atgtcatagaggaccaagacttt

SEQ ID NO: 551 - RNA, 21 nt, Synthetic construct
  source 1..21: mol_type = other RNA
  misc_feature 1: note = monophosphate
  modified_base 1: mod_base = OTHER; note = 2'-O-methyl ribonucleotide
  modified_base 2: mod_base = OTHER; note = 2'-deoxy-2'-fluoro ribonucleotide
  modified_base 3: mod_base = OTHER; note = 2'-O-methyl ribonucleotide
  modified_base 4: mod_base = OTHER; note = 2'-deoxy-2'-fluoro ribonucleotide
  modified_base 5: mod_base = OTHER; note = 2'-O-methyl ribonucleotide
  modified_base 6..7: mod_base = OTHER; note = 2'-deoxy-2'-fluoro ribonucleotide
  modified_base 8..11: mod_base = OTHER; note = 2'-O-methyl ribonucleotide
  modified_base 12: mod_base = OTHER; note = 2'-deoxy-2'-fluoro ribonucleotide
  modified_base 13: mod_base = OTHER; note = 2'-O-methyl ribonucleotide
  modified_base 14: mod_base = OTHER; note = 2'-deoxy-2'-fluoro ribonucleotide
  modified_base 15..21: mod_base = OTHER; note = 2'-O-methyl ribonucleotide
  modified_base 1..2: mod_base = OTHER; note = phosphorothioate internucleotide linkage
  modified_base 2..3: mod_base = OTHER; note = phosphorothioate internucleotide linkage
  modified_base 19..20: mod_base = OTHER; note = phosphorothioate internucleotide linkage
  modified_base 20..21: mod_base = OTHER; note = phosphorothioate internucleotide linkage
tgatgccagtgtggtgtcatt

SEQ ID NO: 552 - RNA, 21 nt, Synthetic construct
  source 1..21: mol_type = other RNA
  modified_base 1: mod_base = OTHER; note = 2'-O-methyl ribonucleotide
  modified_base 2: mod_base = OTHER; note = 2'-deoxy-2'-fluoro ribonucleotide
  modified_base 3..6: mod_base = OTHER; note = 2'-O-methyl ribonucleotide
  modified_base 7: mod_base = OTHER; note = 2'-deoxy-2'-fluoro ribonucleotide
  modified_base 8..11: mod_base = OTHER; note = 2'-O-methyl ribonucleotide
  modified_base 12: mod_base = OTHER; note = 2'-deoxy-2'-fluoro ribonucleotide
  modified_base 13: mod_base = OTHER; note = 2'-O-methyl ribonucleotide
  modified_base 14: mod_base = OTHER; note = 2'-deoxy-2'-fluoro ribonucleotide
  modified_base 15..21: mod_base = OTHER; note = 2'-O-methyl ribonucleotide
  modified_base 1..2: mod_base = OTHER; note = phosphorothioate internucleotide linkage
  modified_base 2..3: mod_base = OTHER; note = phosphorothioate internucleotide linkage
  modified_base 19..20: mod_base = OTHER; note = phosphorothioate internucleotide linkage
  modified_base 20..21: mod_base = OTHER; note = phosphorothioate internucleotide linkage
tggataatattctgttgtctt

SEQ ID NO: 553 - RNA, 21 nt, Synthetic construct
  source 1..21: mol_type = other RNA
  misc_feature 1: note = monophosphate
  modified_base 1: mod_base = OTHER; note = 2'-O-methyl ribonucleotide
  modified_base 2: mod_base = OTHER; note = 2'-deoxy-2'-fluoro ribonucleotide
  modified_base 3: mod_base = OTHER; note = 2'-O-methyl ribonucleotide
  modified_base 4: mod_base = OTHER; note = 2'-deoxy-2'-fluoro ribonucleotide
  modified_base 5: mod_base = OTHER; note = 2'-O-methyl ribonucleotide
  modified_base 6..7: mod_base = OTHER; note = 2'-deoxy-2'-fluoro ribonucleotide
  modified_base 8..11: mod_base = OTHER; note = 2'-O-methyl ribonucleotide
  modified_base 12: mod_base = OTHER; note = 2'-deoxy-2'-fluoro ribonucleotide
  modified_base 13: mod_base = OTHER; note = 2'-O-methyl ribonucleotide
  modified_base 14: mod_base = OTHER; note = 2'-deoxy-2'-fluoro ribonucleotide
  modified_base 15..21: mod_base = OTHER; note = 2'-O-methyl ribonucleotide
  modified_base 1..2: mod_base = OTHER; note = phosphorothioate internucleotide linkage
  modified_base 2..3: mod_base = OTHER; note = phosphorothioate internucleotide linkage
  modified_base 19..20: mod_base = OTHER; note = phosphorothioate internucleotide linkage
  modified_base 20..21: mod_base = OTHER; note = phosphorothioate internucleotide linkage
agacattgtgtcaggttgctt

SEQ ID NO: 554 - RNA, 21 nt, Synthetic construct
  source 1..21: mol_type = other RNA
  misc_feature 1: note = monophosphate
  modified_base 1: mod_base = OTHER; note = 2'-O-methyl ribonucleotide
  modified_base 2: mod_base = OTHER; note = 2'-deoxy-2'-fluoro ribonucleotide
  modified_base 3: mod_base = OTHER; note = 2'-O-methyl ribonucleotide
  modified_base 4: mod_base = OTHER; note = 2'-deoxy-2'-fluoro ribonucleotide
  modified_base 5: mod_base = OTHER; note = 2'-O-methyl ribonucleotide
  modified_base 6..7: mod_base = OTHER; note = 2'-deoxy-2'-fluoro ribonucleotide
  modified_base 8..11: mod_base = OTHER; note = 2'-O-methyl ribonucleotide
  modified_base 12: mod_base = OTHER; note = 2'-deoxy-2'-fluoro ribonucleotide
  modified_base 13: mod_base = OTHER; note = 2'-O-methyl ribonucleotide
  modified_base 14: mod_base = OTHER; note = 2'-deoxy-2'-fluoro ribonucleotide
  modified_base 15..21: mod_base = OTHER; note = 2'-O-methyl ribonucleotide
  modified_base 1..2: mod_base = OTHER; note = phosphorothioate internucleotide linkage
  modified_base 2..3: mod_base = OTHER; note = phosphorothioate internucleotide linkage
  modified_base 19..20: mod_base = OTHER; note = phosphorothioate internucleotide linkage
  modified_base 20..21: mod_base = OTHER; note = phosphorothioate internucleotide linkage
ctgtcactggacattgtgttt

SEQ ID NO: 555 - RNA, 21 nt, Synthetic construct
  source 1..21: mol_type = other RNA
  misc_feature 1: note = monophosphate
  modified_base 1: mod_base = OTHER; note = 2'-O-methyl ribonucleotide
  modified_base 2: mod_base = OTHER; note = 2'-deoxy-2'-fluoro ribonucleotide
  modified_base 3: mod_base = OTHER; note = 2'-O-methyl ribonucleotide
  modified_base 4: mod_base = OTHER; note = 2'-deoxy-2'-fluoro ribonucleotide
  modified_base 5: mod_base = OTHER; note = 2'-O-methyl ribonucleotide
  modified_base 6..7: mod_base = OTHER; note = 2'-deoxy-2'-fluoro ribonucleotide
  modified_base 8..11: mod_base = OTHER; note = 2'-O-methyl ribonucleotide
  modified_base 12: mod_base = OTHER; note = 2'-deoxy-2'-fluoro ribonucleotide
  modified_base 13: mod_base = OTHER; note = 2'-O-methyl ribonucleotide
  modified_base 14: mod_base = OTHER; note = 2'-deoxy-2'-fluoro ribonucleotide
  modified_base 15..21: mod_base = OTHER; note = 2'-O-methyl ribonucleotide
  modified_base 1..2: mod_base = OTHER; note = phosphorothioate internucleotide linkage
  modified_base 2..3: mod_base = OTHER; note = phosphorothioate internucleotide linkage
  modified_base 19..20: mod_base = OTHER; note = phosphorothioate internucleotide linkage
  modified_base 20..21: mod_base = OTHER; note = phosphorothioate internucleotide linkage
ttgtcactggacattgtgttt

SEQ ID NO: 556 - RNA, 21 nt, Synthetic construct
  source 1..21: mol_type = other RNA
  misc_feature 1: note = monophosphate
  modified_base 1: mod_base = OTHER; note = 2'-O-methyl ribonucleotide
  modified_base 2: mod_base = OTHER; note = 2'-deoxy-2'-fluoro ribonucleotide
  modified_base 3: mod_base = OTHER; note = 2'-O-methyl ribonucleotide
  modified_base 4: mod_base = OTHER; note = 2'-deoxy-2'-fluoro ribonucleotide
  modified_base 5: mod_base = OTHER; note = 2'-O-methyl ribonucleotide
  modified_base 6..7: mod_base = OTHER; note = 2'-deoxy-2'-fluoro ribonucleotide
  modified_base 8..11: mod_base = OTHER; note = 2'-O-methyl ribonucleotide
  modified_base 12: mod_base = OTHER; note = 2'-deoxy-2'-fluoro ribonucleotide
  modified_base 13: mod_base = OTHER; note = 2'-O-methyl ribonucleotide
  modified_base 14: mod_base = OTHER; note = 2'-deoxy-2'-fluoro ribonucleotide
  modified_base 15..21: mod_base = OTHER; note = 2'-O-methyl ribonucleotide
  modified_base 1..2: mod_base = OTHER; note = phosphorothioate internucleotide linkage
  modified_base 2..3: mod_base = OTHER; note = phosphorothioate internucleotide linkage
  modified_base 19..20: mod_base = OTHER; note = phosphorothioate internucleotide linkage
  modified_base 20..21: mod_base = OTHER; note = phosphorothioate internucleotide linkage
tgattctgtcactggacattt

SEQ ID NO: 557 - RNA, 21 nt, Synthetic construct
  source 1..21: mol_type = other RNA
  misc_feature 1: note = monophosphate
  modified_base 1: mod_base = OTHER; note = 2'-O-methyl ribonucleotide
  modified_base 2: mod_base = OTHER; note = 2'-deoxy-2'-fluoro ribonucleotide
  modified_base 3: mod_base = OTHER; note = 2'-O-methyl ribonucleotide
  modified_base 4: mod_base = OTHER; note = 2'-deoxy-2'-fluoro ribonucleotide
  modified_base 5: mod_base = OTHER; note = 2'-O-methyl ribonucleotide
  modified_base 6..7: mod_base = OTHER; note = 2'-deoxy-2'-fluoro ribonucleotide
  modified_base 8..11: mod_base = OTHER; note = 2'-O-methyl ribonucleotide
  modified_base 12: mod_base = OTHER; note = 2'-deoxy-2'-fluoro ribonucleotide
  modified_base 13: mod_base = OTHER; note = 2'-O-methyl ribonucleotide
  modified_base 14: mod_base = OTHER; note = 2'-deoxy-2'-fluoro ribonucleotide
  modified_base 15..21: mod_base = OTHER; note = 2'-O-methyl ribonucleotide
  modified_base 1..2: mod_base = OTHER; note = phosphorothioate internucleotide linkage
  modified_base 2..3: mod_base = OTHER; note = phosphorothioate internucleotide linkage
  modified_base 19..20: mod_base = OTHER; note = phosphorothioate internucleotide linkage
  modified_base 20..21: mod_base = OTHER; note = phosphorothioate internucleotide linkage
cttgattctgtcactggactt

SEQ ID NO: 558 - RNA, 21 nt, Synthetic construct
  source 1..21: mol_type = other RNA
  misc_feature 1: note = monophosphate
  modified_base 1: mod_base = OTHER; note = 2'-O-methyl ribonucleotide
  modified_base 2: mod_base = OTHER; note = 2'-deoxy-2'-fluoro ribonucleotide
  modified_base 3: mod_base = OTHER; note = 2'-O-methyl ribonucleotide
  modified_base 4: mod_base = OTHER; note = 2'-deoxy-2'-fluoro ribonucleotide
  modified_base 5: mod_base = OTHER; note = 2'-O-methyl ribonucleotide
  modified_base 6..7: mod_base = OTHER; note = 2'-deoxy-2'-fluoro ribonucleotide
  modified_base 8..11: mod_base = OTHER; note = 2'-O-methyl ribonucleotide
  modified_base 12: mod_base = OTHER; note = 2'-deoxy-2'-fluoro ribonucleotide
  modified_base 13: mod_base = OTHER; note = 2'-O-methyl ribonucleotide
  modified_base 14: mod_base = OTHER; note = 2'-deoxy-2'-fluoro ribonucleotide
  modified_base 15..21: mod_base = OTHER; note = 2'-O-methyl ribonucleotide
  modified_base 1..2: mod_base = OTHER; note = phosphorothioate internucleotide linkage
  modified_base 2..3: mod_base = OTHER; note = phosphorothioate internucleotide linkage
  modified_base 19..20: mod_base = OTHER; note = phosphorothioate internucleotide linkage
  modified_base 20..21: mod_base = OTHER; note = phosphorothioate internucleotide linkage
tttgattctgtcactggactt

SEQ ID NO: 559 - RNA, 21 nt, Synthetic construct
  source 1..21: mol_type = other RNA
  misc_feature 1: note = monophosphate
  modified_base 1: mod_base = OTHER; note = 2'-O-methyl ribonucleotide
  modified_base 2: mod_base = OTHER; note = 2'-deoxy-2'-fluoro ribonucleotide
  modified_base 3: mod_base = OTHER; note = 2'-O-methyl ribonucleotide
  modified_base 4: mod_base = OTHER; note = 2'-deoxy-2'-fluoro ribonucleotide
  modified_base 5: mod_base = OTHER; note = 2'-O-methyl ribonucleotide
  modified_base 6..7: mod_base = OTHER; note = 2'-deoxy-2'-fluoro ribonucleotide
  modified_base 8..11: mod_base = OTHER; note = 2'-O-methyl ribonucleotide
  modified_base 12: mod_base = OTHER; note = 2'-deoxy-2'-fluoro ribonucleotide
  modified_base 13: mod_base = OTHER; note = 2'-O-methyl ribonucleotide
  modified_base 14: mod_base = OTHER; note = 2'-deoxy-2'-fluoro ribonucleotide
  modified_base 15..21: mod_base = OTHER; note = 2'-O-methyl ribonucleotide
  modified_base 1..2: mod_base = OTHER; note = phosphorothioate internucleotide linkage
  modified_base 2..3: mod_base = OTHER; note = phosphorothioate internucleotide linkage
  modified_base 19..20: mod_base = OTHER; note = phosphorothioate internucleotide linkage
  modified_base 20..21: mod_base = OTHER; note = phosphorothioate internucleotide linkage
acttgattctgtcactggatt

SEQ ID NO: 560 - RNA, 21 nt, Synthetic construct
  source 1..21: mol_type = other RNA
  misc_feature 1: note = monophosphate
  modified_base 1: mod_base = OTHER; note = 2'-O-methyl ribonucleotide
  modified_base 2: mod_base = OTHER; note = 2'-deoxy-2'-fluoro ribonucleotide
  modified_base 3: mod_base = OTHER; note = 2'-O-methyl ribonucleotide
  modified_base 4: mod_base = OTHER; note = 2'-deoxy-2'-fluoro ribonucleotide
  modified_base 5: mod_base = OTHER; note = 2'-O-methyl ribonucleotide
  modified_base 6..7: mod_base = OTHER; note = 2'-deoxy-2'-fluoro ribonucleotide
  modified_base 8..11: mod_base = OTHER; note = 2'-O-methyl ribonucleotide
  modified_base 12: mod_base = OTHER; note = 2'-deoxy-2'-fluoro ribonucleotide
  modified_base 13: mod_base = OTHER; note = 2'-O-methyl ribonucleotide
  modified_base 14: mod_base = OTHER; note = 2'-deoxy-2'-fluoro ribonucleotide
  modified_base 15..21: mod_base = OTHER; note = 2'-O-methyl ribonucleotide
  modified_base 1..2: mod_base = OTHER; note = phosphorothioate internucleotide linkage
  modified_base 2..3: mod_base = OTHER; note = phosphorothioate internucleotide linkage
  modified_base 19..20: mod_base = OTHER; note = phosphorothioate internucleotide linkage
  modified_base 20..21: mod_base = OTHER; note = phosphorothioate internucleotide linkage
tacttgattctgtcactggtt

SEQ ID NO: 561 - RNA, 23 nt, Synthetic construct
  source 1..23: mol_type = other RNA
  modified_base 1: mod_base = OTHER; note = 2'-O-methyl ribonucleotide
  modified_base 2: mod_base = OTHER; note = 2'-deoxy-2'-fluoro ribonucleotide
  modified_base 3..6: mod_base = OTHER; note = 2'-O-methyl ribonucleotide
  modified_base 7: mod_base = OTHER; note = 2'-deoxy-2'-fluoro ribonucleotide
  modified_base 8..11: mod_base = OTHER; note = 2'-O-methyl ribonucleotide
  modified_base 12: mod_base = OTHER; note = 2'-deoxy-2'-fluoro ribonucleotide
  modified_base 13: mod_base = OTHER; note = 2'-O-methyl ribonucleotide
  modified_base 14: mod_base = OTHER; note = 2'-deoxy-2'-fluoro ribonucleotide
  modified_base 15..23: mod_base = OTHER; note = 2'-O-methyl ribonucleotide
  modified_base 1..2: mod_base = OTHER; note = phosphorothioate internucleotide linkage
  modified_base 2..3: mod_base = OTHER; note = phosphorothioate internucleotide linkage
  modified_base 21..22: mod_base = OTHER; note = phosphorothioate internucleotide linkage
  modified_base 22..23: mod_base = OTHER; note = phosphorothioate internucleotide linkage
tacttgattctgtcactggactt

SEQ ID NO: 562 - RNA, 23 nt, Synthetic construct
  source 1..23: mol_type = other RNA
  modified_base 1: mod_base = OTHER; note = 2'-O-methyl ribonucleotide
  modified_base 2: mod_base = OTHER; note = 2'-deoxy-2'-fluoro ribonucleotide
  modified_base 3: mod_base = OTHER; note = 2'-O-methyl ribonucleotide
  modified_base 4: mod_base = OTHER; note = 2'-deoxy-2'-fluoro ribonucleotide
  modified_base 5: mod_base = OTHER; note = 2'-O-methyl ribonucleotide
  modified_base 6: mod_base = OTHER; note = 2'-deoxy-2'-fluoro ribonucleotide
  modified_base 7: mod_base = OTHER; note = 2'-O-methyl ribonucleotide
  modified_base 8..9: mod_base = OTHER; note = 2'-deoxy-2'-fluoro ribonucleotide
  modified_base 10..13: mod_base = OTHER; note = 2'-O-methyl ribonucleotide
  modified_base 14: mod_base = OTHER; note = 2'-deoxy-2'-fluoro ribonucleotide
  modified_base 15: mod_base = OTHER; note = 2'-O-methyl ribonucleotide
  modified_base 16: mod_base = OTHER; note = 2'-deoxy-2'-fluoro ribonucleotide
  modified_base 17..23: mod_base = OTHER; note = 2'-O-methyl ribonucleotide
  modified_base 1..2: mod_base = OTHER; note = phosphorothioate internucleotide linkage
  modified_base 2..3: mod_base = OTHER; note = phosphorothioate internucleotide linkage
  modified_base 21..22: mod_base = OTHER; note = phosphorothioate internucleotide linkage
  modified_base 22..23: mod_base = OTHER; note = phosphorothioate internucleotide linkage
tacttgattctgtcactggactt

SEQ ID NO: 563 - RNA, 21 nt, Synthetic construct
  source 1..21: mol_type = other RNA
  modified_base 1: mod_base = OTHER; note = 2'-O-methyl ribonucleotide
  modified_base 2: mod_base = OTHER; note = 2'-deoxy-2'-fluoro ribonucleotide
  modified_base 3..6: mod_base = OTHER; note = 2'-O-methyl ribonucleotide
  modified_base 7: mod_base = OTHER; note = 2'-deoxy-2'-fluoro ribonucleotide
  modified_base 8..11: mod_base = OTHER; note = 2'-O-methyl ribonucleotide
  modified_base 12: mod_base = OTHER; note = 2'-deoxy-2'-fluoro ribonucleotide
  modified_base 13: mod_base = OTHER; note = 2'-O-methyl ribonucleotide
  modified_base 14: mod_base = OTHER; note = 2'-deoxy-2'-fluoro ribonucleotide
  modified_base 15..21: mod_base = OTHER; note = 2'-O-methyl ribonucleotide
  modified_base 1..2: mod_base = OTHER; note = phosphorothioate internucleotide linkage
  modified_base 2..3: mod_base = OTHER; note = phosphorothioate internucleotide linkage
  modified_base 19..20: mod_base = OTHER; note = phosphorothioate internucleotide linkage
  modified_base 20..21: mod_base = OTHER; note = phosphorothioate internucleotide linkage
tacttgattctgtcactggtt

SEQ ID NO: 564 - RNA, 21 nt, Synthetic construct
  source 1..21: mol_type = other RNA
  modified_base 1: mod_base = OTHER; note = 2'-O-methyl ribonucleotide
  modified_base 2: mod_base = OTHER; note = 2'-deoxy-2'-fluoro ribonucleotide
  modified_base 3..6: mod_base = OTHER; note = 2'-O-methyl ribonucleotide
  modified_base 7: mod_base = OTHER; note = 2'-deoxy-2'-fluoro ribonucleotide
  modified_base 8..13: mod_base = OTHER; note = 2'-O-methyl ribonucleotide
  modified_base 14: mod_base = OTHER; note = 2'-deoxy-2'-fluoro ribonucleotide
  modified_base 15: mod_base = OTHER; note = 2'-O-methyl ribonucleotide
  modified_base 16: mod_base = OTHER; note = 2'-deoxy-2'-fluoro ribonucleotide
  modified_base 17..21: mod_base = OTHER; note = 2'-O-methyl ribonucleotide
  modified_base 1..2: mod_base = OTHER; note = phosphorothioate internucleotide linkage
  modified_base 2..3: mod_base = OTHER; note = phosphorothioate internucleotide linkage
  modified_base 19..20: mod_base = OTHER; note = phosphorothioate internucleotide linkage
  modified_base 20..21: mod_base = OTHER; note = phosphorothioate internucleotide linkage
tacttgattctgtcactggtt

SEQ ID NO: 565 - RNA, 21 nt, Synthetic construct
  source 1..21: mol_type = other RNA
  modified_base 1: mod_base = OTHER; note = 2'-O-methyl ribonucleotide
  modified_base 2: mod_base = OTHER; note = 2'-deoxy-2'-fluoro ribonucleotide
  modified_base 3..6: mod_base = OTHER; note = 2'-O-methyl ribonucleotide
  modified_base 7: mod_base = OTHER; note = 2'-deoxy-2'-fluoro ribonucleotide
  modified_base 8..11: mod_base = OTHER; note = 2'-O-methyl ribonucleotide
  modified_base 12: mod_base = OTHER; note = 2'-deoxy-2'-fluoro ribonucleotide
  modified_base 13: mod_base = OTHER; note = 2'-O-methyl ribonucleotide
  modified_base 14: mod_base = OTHER; note = 2'-deoxy-2'-fluoro ribonucleotide
  modified_base 15: mod_base = OTHER; note = 2'-O-methyl ribonucleotide
  modified_base 16: mod_base = OTHER; note = 2'-deoxy-2'-fluoro ribonucleotide
  modified_base 17..21: mod_base = OTHER; note = 2'-O-methyl ribonucleotide
  modified_base 1..2: mod_base = OTHER; note = phosphorothioate internucleotide linkage
  modified_base 2..3: mod_base = OTHER; note = phosphorothioate internucleotide linkage
  modified_base 19..20: mod_base = OTHER; note = phosphorothioate internucleotide linkage
  modified_base 20..21: mod_base = OTHER; note = phosphorothioate internucleotide linkage
tacttgattctgtcactggtt

SEQ ID NO: 566 - RNA, 21 nt, Synthetic construct
  source 1..21: mol_type = other RNA
  modified_base 1: mod_base = OTHER; note = 2'-O-methyl ribonucleotide
  modified_base 2: mod_base = OTHER; note = 2'-deoxy-2'-fluoro ribonucleotide
  modified_base 3..7: mod_base = OTHER; note = 2'-O-methyl ribonucleotide
  modified_base 8..9: mod_base = OTHER; note = 2'-deoxy-2'-fluoro ribonucleotide
  modified_base 10..13: mod_base = OTHER; note = 2'-O-methyl ribonucleotide
  modified_base 14: mod_base = OTHER; note = 2'-deoxy-2'-fluoro ribonucleotide
  modified_base 15: mod_base = OTHER; note = 2'-O-methyl ribonucleotide
  modified_base 16: mod_base = OTHER; note = 2'-deoxy-2'-fluoro ribonucleotide
  modified_base 17..21: mod_base = OTHER; note = 2'-O-methyl ribonucleotide
  modified_base 1..2: mod_base = OTHER; note = phosphorothioate internucleotide linkage
  modified_base 2..3: mod_base = OTHER; note = phosphorothioate internucleotide linkage
  modified_base 19..20: mod_base = OTHER; note = phosphorothioate internucleotide linkage
  modified_base 20..21: mod_base = OTHER; note = phosphorothioate internucleotide linkage
tacttgattctgtcactggtt

SEQ ID NO: 567 - RNA, 23 nt, Synthetic construct
  source 1..23: mol_type = other RNA
  modified_base 1: mod_base = OTHER; note = 2'-O-methyl ribonucleotide
  modified_base 2: mod_base = OTHER; note = 2'-deoxy-2'-fluoro ribonucleotide
  modified_base 3..6: mod_base = OTHER; note = 2'-O-methyl ribonucleotide
  modified_base 7: mod_base = OTHER; note = 2'-deoxy-2'-fluoro ribonucleotide
  modified_base 8..13: mod_base = OTHER; note = 2'-O-methyl ribonucleotide
  modified_base 14: mod_base = OTHER; note = 2'-deoxy-2'-fluoro ribonucleotide
  modified_base 15: mod_base = OTHER; note = 2'-O-methyl ribonucleotide
  modified_base 16: mod_base = OTHER; note = 2'-deoxy-2'-fluoro ribonucleotide
  modified_base 17..23: mod_base = OTHER; note = 2'-O-methyl ribonucleotide
  modified_base 1..2: mod_base = OTHER; note = phosphorothioate internucleotide linkage
  modified_base 2..3: mod_base = OTHER; note = phosphorothioate internucleotide linkage
  modified_base 21..22: mod_base = OTHER; note = phosphorothioate internucleotide linkage
  modified_base 22..23: mod_base = OTHER; note = phosphorothioate internucleotide linkage
tacttgattctgtcactggactt

SEQ ID NO: 568 - RNA, 23 nt, Synthetic construct
  source 1..23: mol_type = other RNA
  modified_base 1: mod_base = OTHER; note = 2'-O-methyl ribonucleotide
  modified_base 2: mod_base = OTHER; note = 2'-deoxy-2'-fluoro ribonucleotide
  modified_base 3..6: mod_base = OTHER; note = 2'-O-methyl ribonucleotide
  modified_base 7: mod_base = OTHER; note = 2'-deoxy-2'-fluoro ribonucleotide
  modified_base 8..11: mod_base = OTHER; note = 2'-O-methyl ribonucleotide
  modified_base 12: mod_base = OTHER; note = 2'-deoxy-2'-fluoro ribonucleotide
  modified_base 13: mod_base = OTHER; note = 2'-O-methyl ribonucleotide
  modified_base 14: mod_base = OTHER; note = 2'-deoxy-2'-fluoro ribonucleotide
  modified_base 15: mod_base = OTHER; note = 2'-O-methyl ribonucleotide
  modified_base 16: mod_base = OTHER; note = 2'-deoxy-2'-fluoro ribonucleotide
  modified_base 17..23: mod_base = OTHER; note = 2'-O-methyl ribonucleotide
  modified_base 1..2: mod_base = OTHER; note = phosphorothioate internucleotide linkage
  modified_base 2..3: mod_base = OTHER; note = phosphorothioate internucleotide linkage
  modified_base 21..22: mod_base = OTHER; note = phosphorothioate internucleotide linkage
  modified_base 22..23: mod_base = OTHER; note = phosphorothioate internucleotide linkage
tacttgattctgtcactggactt

SEQ ID NO: 569 - RNA, 21 nt, Synthetic construct
  source 1..21: mol_type = other RNA
  modified_base 1: mod_base = OTHER; note = 2'-O-methyl ribonucleotide
  modified_base 2: mod_base = OTHER; note = 2'-deoxy-2'-fluoro ribonucleotide
  modified_base 3..6: mod_base = OTHER; note = 2'-O-methyl ribonucleotide
  modified_base 7: mod_base = OTHER; note = 2'-deoxy-2'-fluoro ribonucleotide
  modified_base 8..11: mod_base = OTHER; note = 2'-O-methyl ribonucleotide
  modified_base 12: mod_base = OTHER; note = 2'-deoxy-2'-fluoro ribonucleotide
  modified_base 13: mod_base = OTHER; note = 2'-O-methyl ribonucleotide
  modified_base 14: mod_base = OTHER; note = 2'-deoxy-2'-fluoro ribonucleotide
  modified_base 15..21: mod_base = OTHER; note = 2'-O-methyl ribonucleotide
  modified_base 1..2: mod_base = OTHER; note = phosphorothioate internucleotide linkage
  modified_base 2..3: mod_base = OTHER; note = phosphorothioate internucleotide linkage
  modified_base 19..20: mod_base = OTHER; note = phosphorothioate internucleotide linkage
  modified_base 20..21: mod_base = OTHER; note = phosphorothioate internucleotide linkage
tacttgattctgtcactggac

SEQ ID NO: 570 - RNA, 21 nt, Synthetic construct
  source 1..21: mol_type = other RNA
  misc_feature 1: note = monophosphate
  modified_base 1: mod_base = OTHER; note = 2'-O-methyl ribonucleotide
  modified_base 2: mod_base = OTHER; note = 2'-deoxy-2'-fluoro ribonucleotide
  modified_base 3: mod_base = OTHER; note = 2'-O-methyl ribonucleotide
  modified_base 4: mod_base = OTHER; note = 2'-deoxy-2'-fluoro ribonucleotide
  modified_base 5: mod_base = OTHER; note = 2'-O-methyl ribonucleotide
  modified_base 6..7: mod_base = OTHER; note = 2'-deoxy-2'-fluoro ribonucleotide
  modified_base 8..11: mod_base = OTHER; note = 2'-O-methyl ribonucleotide
  modified_base 12: mod_base = OTHER; note = 2'-deoxy-2'-fluoro ribonucleotide
  modified_base 13: mod_base = OTHER; note = 2'-O-methyl ribonucleotide
  modified_base 14: mod_base = OTHER; note = 2'-deoxy-2'-fluoro ribonucleotide
  modified_base 15..21: mod_base = OTHER; note = 2'-O-methyl ribonucleotide
  modified_base 1..2: mod_base = OTHER; note = phosphorothioate internucleotide linkage
  modified_base 2..3: mod_base = OTHER; note = phosphorothioate internucleotide linkage
  modified_base 19..20: mod_base = OTHER; note = phosphorothioate internucleotide linkage
  modified_base 20..21: mod_base = OTHER; note = phosphorothioate internucleotide linkage
ccttcctgtaacagtggtgtt

SEQ ID NO: 571 - RNA, 21 nt, Synthetic construct
  source 1..21: mol_type = other RNA
  misc_feature 1: note = monophosphate
  modified_base 1: mod_base = OTHER; note = 2'-O-methyl ribonucleotide
  modified_base 2: mod_base = OTHER; note = 2'-deoxy-2'-fluoro ribonucleotide
  modified_base 3: mod_base = OTHER; note = 2'-O-methyl ribonucleotide
  modified_base 4: mod_base = OTHER; note = 2'-deoxy-2'-fluoro ribonucleotide
  modified_base 5: mod_base = OTHER; note = 2'-O-methyl ribonucleotide
  modified_base 6..7: mod_base = OTHER; note = 2'-deoxy-2'-fluoro ribonucleotide
  modified_base 8..11: mod_base = OTHER; note = 2'-O-methyl ribonucleotide
  modified_base 12: mod_base = OTHER; note = 2'-deoxy-2'-fluoro ribonucleotide
  modified_base 13: mod_base = OTHER; note = 2'-O-methyl ribonucleotide
  modified_base 14: mod_base = OTHER; note = 2'-deoxy-2'-fluoro ribonucleotide
  modified_base 15..21: mod_base = OTHER; note = 2'-O-methyl ribonucleotide
  modified_base 1..2: mod_base = OTHER; note = phosphorothioate internucleotide linkage
  modified_base 2..3: mod_base = OTHER; note = phosphorothioate internucleotide linkage
  modified_base 19..20: mod_base = OTHER; note = phosphorothioate internucleotide linkage
  modified_base 20..21: mod_base = OTHER; note = phosphorothioate internucleotide linkage
tcttcctgtaacagtggtgtt

SEQ ID NO: 572 - RNA, 23 nt, Synthetic construct
  source 1..23: mol_type = other RNA
  modified_base 1: mod_base = OTHER; note = 2'-O-methyl ribonucleotide
  modified_base 2: mod_base = OTHER; note = 2'-deoxy-2'-fluoro ribonucleotide
  modified_base 3: mod_base = OTHER; note = 2'-O-methyl ribonucleotide
  modified_base 4: mod_base = OTHER; note = 2'-deoxy-2'-fluoro ribonucleotide
  modified_base 5: mod_base = OTHER; note = 2'-O-methyl ribonucleotide
  modified_base 6: mod_base = OTHER; note = 2'-deoxy-2'-fluoro ribonucleotide
  modified_base 7: mod_base = OTHER; note = 2'-O-methyl ribonucleotide
  modified_base 8..9: mod_base = OTHER; note = 2'-deoxy-2'-fluoro ribonucleotide
  modified_base 10..13: mod_base = OTHER; note = 2'-O-methyl ribonucleotide
  modified_base 14: mod_base = OTHER; note = 2'-deoxy-2'-fluoro ribonucleotide
  modified_base 15: mod_base = OTHER; note = 2'-O-methyl ribonucleotide
  modified_base 16: mod_base = OTHER; note = 2'-deoxy-2'-fluoro ribonucleotide
  modified_base 17..23: mod_base = OTHER; note = 2'-O-methyl ribonucleotide
  modified_base 1..2: mod_base = OTHER; note = phosphorothioate internucleotide linkage
  modified_base 2..3: mod_base = OTHER; note = phosphorothioate internucleotide linkage
  modified_base 21..22: mod_base = OTHER; note = phosphorothioate internucleotide linkage
  modified_base 22..23: mod_base = OTHER; note = phosphorothioate internucleotide linkage
taccatttgggtagtattctgtt

SEQ ID NO: 573 - RNA, 21 nt, Synthetic construct
  source 1..21: mol_type = other RNA
  misc_feature 1: note = monophosphate
  modified_base 1: mod_base = OTHER; note = 2'-O-methyl ribonucleotide
  modified_base 2: mod_base = OTHER; note = 2'-deoxy-2'-fluoro ribonucleotide
  modified_base 3: mod_base = OTHER; note = 2'-O-methyl ribonucleotide
  modified_base 4: mod_base = OTHER; note = 2'-deoxy-2'-fluoro ribonucleotide
  modified_base 5: mod_base = OTHER; note = 2'-O-methyl ribonucleotide
  modified_base 6..7: mod_base = OTHER; note = 2'-deoxy-2'-fluoro ribonucleotide
  modified_base 8..11: mod_base = OTHER; note = 2'-O-methyl ribonucleotide
  modified_base 12: mod_base = OTHER; note = 2'-deoxy-2'-fluoro ribonucleotide
  modified_base 13: mod_base = OTHER; note = 2'-O-methyl ribonucleotide
  modified_base 14: mod_base = OTHER; note = 2'-deoxy-2'-fluoro ribonucleotide
  modified_base 15..21: mod_base = OTHER; note = 2'-O-methyl ribonucleotide
  modified_base 1..2: mod_base = OTHER; note = phosphorothioate internucleotide linkage
  modified_base 2..3: mod_base = OTHER; note = phosphorothioate internucleotide linkage
  modified_base 19..20: mod_base = OTHER; note = phosphorothioate internucleotide linkage
  modified_base 20..21: mod_base = OTHER; note = phosphorothioate internucleotide linkage
ggtcaggccaccatttgggtt

SEQ ID NO: 574 - RNA, 21 nt, Synthetic construct
  source 1..21: mol_type = other RNA
  misc_feature 1: note = monophosphate
  modified_base 1: mod_base = OTHER; note = 2'-O-methyl ribonucleotide
  modified_base 2: mod_base = OTHER; note = 2'-deoxy-2'-fluoro ribonucleotide
  modified_base 3: mod_base = OTHER; note = 2'-O-methyl ribonucleotide
  modified_base 4: mod_base = OTHER; note = 2'-deoxy-2'-fluoro ribonucleotide
  modified_base 5: mod_base = OTHER; note = 2'-O-methyl ribonucleotide
  modified_base 6..7: mod_base = OTHER; note = 2'-deoxy-2'-fluoro ribonucleotide
  modified_base 8..11: mod_base = OTHER; note = 2'-O-methyl ribonucleotide
  modified_base 12: mod_base = OTHER; note = 2'-deoxy-2'-fluoro ribonucleotide
  modified_base 13: mod_base = OTHER; note = 2'-O-methyl ribonucleotide
  modified_base 14: mod_base = OTHER; note = 2'-deoxy-2'-fluoro ribonucleotide
  modified_base 15..21: mod_base = OTHER; note = 2'-O-methyl ribonucleotide
  modified_base 1..2: mod_base = OTHER; note = phosphorothioate internucleotide linkage
  modified_base 2..3: mod_base = OTHER; note = phosphorothioate internucleotide linkage
  modified_base 19..20: mod_base = OTHER; note = phosphorothioate internucleotide linkage
  modified_base 20..21: mod_base = OTHER; note = phosphorothioate internucleotide linkage
cactgggatccatggtatatt

SEQ ID NO: 575 - RNA, 21 nt, Synthetic construct
  source 1..21: mol_type = other RNA
  misc_feature 1: note = monophosphate
  modified_base 1: mod_base = OTHER; note = 2'-O-methyl ribonucleotide
  modified_base 2: mod_base = OTHER; note = 2'-deoxy-2'-fluoro ribonucleotide
  modified_base 3: mod_base = OTHER; note = 2'-O-methyl ribonucleotide
  modified_base 4: mod_base = OTHER; note = 2'-deoxy-2'-fluoro ribonucleotide
  modified_base 5: mod_base = OTHER; note = 2'-O-methyl ribonucleotide
  modified_base 6..7: mod_base = OTHER; note = 2'-deoxy-2'-fluoro ribonucleotide
  modified_base 8..11: mod_base = OTHER; note = 2'-O-methyl ribonucleotide
  modified_base 12: mod_base = OTHER; note = 2'-deoxy-2'-fluoro ribonucleotide
  modified_base 13: mod_base = OTHER; note = 2'-O-methyl ribonucleotide
  modified_base 14: mod_base = OTHER; note = 2'-deoxy-2'-fluoro ribonucleotide
  modified_base 15..21: mod_base = OTHER; note = 2'-O-methyl ribonucleotide
  modified_base 1..2: mod_base = OTHER; note = phosphorothioate internucleotide linkage
  modified_base 2..3: mod_base = OTHER; note = phosphorothioate internucleotide linkage
  modified_base 19..20: mod_base = OTHER; note = phosphorothioate internucleotide linkage
  modified_base 20..21: mod_base = OTHER; note = phosphorothioate internucleotide linkage
tactgggatccatggtatatt

SEQ ID NO: 576 - RNA, 21 nt, Synthetic construct
  source 1..21: mol_type = other RNA
  misc_feature 1: note = monophosphate
  modified_base 1: mod_base = OTHER; note = 2'-O-methyl ribonucleotide
  modified_base 2: mod_base = OTHER; note = 2'-deoxy-2'-fluoro ribonucleotide
  modified_base 3: mod_base = OTHER; note = 2'-O-methyl ribonucleotide
  modified_base 4: mod_base = OTHER; note = 2'-deoxy-2'-fluoro ribonucleotide
  modified_base 5: mod_base = OTHER; note = 2'-O-methyl ribonucleotide
  modified_base 6..7: mod_base = OTHER; note = 2'-deoxy-2'-fluoro ribonucleotide
  modified_base 8..11: mod_base = OTHER; note = 2'-O-methyl ribonucleotide
  modified_base 12: mod_base = OTHER; note = 2'-deoxy-2'-fluoro ribonucleotide
  modified_base 13: mod_base = OTHER; note = 2'-O-methyl ribonucleotide
  modified_base 14: mod_base = OTHER; note = 2'-deoxy-2'-fluoro ribonucleotide
  modified_base 15..21: mod_base = OTHER; note = 2'-O-methyl ribonucleotide
  modified_base 1..2: mod_base = OTHER; note = phosphorothioate internucleotide linkage
  modified_base 2..3: mod_base = OTHER; note = phosphorothioate internucleotide linkage
  modified_base 19..20: mod_base = OTHER; note = phosphorothioate internucleotide linkage
  modified_base 20..21: mod_base = OTHER; note = phosphorothioate internucleotide linkage
agttggtgcttcttcagaatt

SEQ ID NO: 577 - RNA, 23 nt, Synthetic construct
  source 1..23: mol_type = other RNA
  misc_feature 1: note = monophosphate
  modified_base 1: mod_base = OTHER; note = 2'-O-methyl ribonucleotide
  modified_base 2: mod_base = OTHER; note = 2'-deoxy-2'-fluoro ribonucleotide
  modified_base 3: mod_base = OTHER; note = 2'-O-methyl ribonucleotide
  modified_base 4: mod_base = OTHER; note = 2'-deoxy-2'-fluoro ribonucleotide
  modified_base 5: mod_base = OTHER; note = 2'-O-methyl ribonucleotide
  modified_base 6..7: mod_base = OTHER; note = 2'-deoxy-2'-fluoro ribonucleotide
  modified_base 8..11: mod_base = OTHER; note = 2'-O-methyl ribonucleotide
  modified_base 12: mod_base = OTHER; note = 2'-deoxy-2'-fluoro ribonucleotide
  modified_base 13: mod_base = OTHER; note = 2'-O-methyl ribonucleotide
  modified_base 14: mod_base = OTHER; note = 2'-deoxy-2'-fluoro ribonucleotide
  modified_base 15..23: mod_base = OTHER; note = 2'-O-methyl ribonucleotide
  modified_base 1..2: mod_base = OTHER; note = phosphorothioate internucleotide linkage
  modified_base 2..3: mod_base = OTHER; note = phosphorothioate internucleotide linkage
  modified_base 21..22: mod_base = OTHER; note = phosphorothioate internucleotide linkage
  modified_base 22..23: mod_base = OTHER; note = phosphorothioate internucleotide linkage
agttggtgcttcttcagaaggtt

SEQ ID NO: 578 - RNA, 23 nt, Synthetic construct
  source 1..23: mol_type = other RNA
  misc_feature 1: note = monophosphate
  modified_base 1: mod_base = OTHER; note = 2'-O-methyl ribonucleotide
  modified_base 2: mod_base = OTHER; note = 2'-deoxy-2'-fluoro ribonucleotide
  modified_base 3: mod_base = OTHER; note = 2'-O-methyl ribonucleotide
  modified_base 4: mod_base = OTHER; note = 2'-deoxy-2'-fluoro ribonucleotide
  modified_base 5: mod_base = OTHER; note = 2'-O-methyl ribonucleotide
  modified_base 6: mod_base = OTHER; note = 2'-deoxy-2'-fluoro ribonucleotide
  modified_base 7: mod_base = OTHER; note = 2'-O-methyl ribonucleotide
  modified_base 8..9: mod_base = OTHER; note = 2'-deoxy-2'-fluoro ribonucleotide
  modified_base 10..13: mod_base = OTHER; note = 2'-O-methyl ribonucleotide
  modified_base 14: mod_base = OTHER; note = 2'-deoxy-2'-fluoro ribonucleotide
  modified_base 15: mod_base = OTHER; note = 2'-O-methyl ribonucleotide
  modified_base 16: mod_base = OTHER; note = 2'-deoxy-2'-fluoro ribonucleotide
  modified_base 17..23: mod_base = OTHER; note = 2'-O-methyl ribonucleotide
  modified_base 1..2: mod_base = OTHER; note = phosphorothioate internucleotide linkage
  modified_base 2..3: mod_base = OTHER; note = phosphorothioate internucleotide linkage
  modified_base 21..22: mod_base = OTHER; note = phosphorothioate internucleotide linkage
  modified_base 22..23: mod_base = OTHER; note = phosphorothioate internucleotide linkage
agttggtgcttcttcagaaggtt

SEQ ID NO: 579 - RNA, 23 nt, Synthetic construct
  source 1..23: mol_type = other RNA
  misc_feature 1: note = monophosphate
  modified_base 1: mod_base = OTHER; note = 2'-O-methyl ribonucleotide
  modified_base 2: mod_base = OTHER; note = 2'-deoxy-2'-fluoro ribonucleotide
  modified_base 3: mod_base = OTHER; note = 2'-O-methyl ribonucleotide
  modified_base 4: mod_base = OTHER; note = 2'-deoxy-2'-fluoro ribonucleotide
  modified_base 5..6: mod_base = OTHER; note = 2'-O-methyl ribonucleotide
  modified_base 7: mod_base = OTHER; note = 2'-deoxy-2'-fluoro ribonucleotide
  modified_base 8..11: mod_base = OTHER; note = 2'-O-methyl ribonucleotide
  modified_base 12: mod_base = OTHER; note = 2'-deoxy-2'-fluoro ribonucleotide
  modified_base 13: mod_base = OTHER; note = 2'-O-methyl ribonucleotide
  modified_base 14: mod_base = OTHER; note = 2'-deoxy-2'-fluoro ribonucleotide
  modified_base 15..23: mod_base = OTHER; note = 2'-O-methyl ribonucleotide
  modified_base 1..2: mod_base = OTHER; note = phosphorothioate internucleotide linkage
  modified_base 2..3: mod_base = OTHER; note = phosphorothioate internucleotide linkage
  modified_base 21..22: mod_base = OTHER; note = phosphorothioate internucleotide linkage
  modified_base 22..23: mod_base = OTHER; note = phosphorothioate internucleotide linkage
agttggtgcttcttcagaaggtt

SEQ ID NO: 580 - RNA, 23 nt, Synthetic construct
  source 1..23: mol_type = other RNA
  misc_feature 1: note = monophosphate
  modified_base 1: mod_base = OTHER; note = 2'-O-methyl ribonucleotide
  modified_base 2: mod_base = OTHER; note = 2'-deoxy-2'-fluoro ribonucleotide
  modified_base 3..5: mod_base = OTHER; note = 2'-O-methyl ribonucleotide
  modified_base 6..7: mod_base = OTHER; note = 2'-deoxy-2'-fluoro ribonucleotide
  modified_base 8..11: mod_base = OTHER; note = 2'-O-methyl ribonucleotide
  modified_base 12: mod_base = OTHER; note = 2'-deoxy-2'-fluoro ribonucleotide
  modified_base 13: mod_base = OTHER; note = 2'-O-methyl ribonucleotide
  modified_base 14: mod_base = OTHER; note = 2'-deoxy-2'-fluoro ribonucleotide
  modified_base 15..23: mod_base = OTHER; note = 2'-O-methyl ribonucleotide
  modified_base 1..2: mod_base = OTHER; note = phosphorothioate internucleotide linkage
  modified_base 2..3: mod_base = OTHER; note = phosphorothioate internucleotide linkage
  modified_base 21..22: mod_base = OTHER; note = phosphorothioate internucleotide linkage
  modified_base 22..23: mod_base = OTHER; note = phosphorothioate internucleotide linkage
agttggtgcttcttcagaaggtt

SEQ ID NO: 581 - RNA, 23 nt, Synthetic construct
  source 1..23: mol_type = other RNA
  misc_feature 1: note = monophosphate
  modified_base 1: mod_base = OTHER; note = 2'-O-methyl ribonucleotide
  modified_base 2: mod_base = OTHER; note = 2'-deoxy-2'-fluoro ribonucleotide
  modified_base 3..6: mod_base = OTHER; note = 2'-O-methyl ribonucleotide
  modified_base 7: mod_base = OTHER; note = 2'-deoxy-2'-fluoro ribonucleotide
  modified_base 8..11: mod_base = OTHER; note = 2'-O-methyl ribonucleotide
  modified_base 12: mod_base = OTHER; note = 2'-deoxy-2'-fluoro ribonucleotide
  modified_base 13: mod_base = OTHER; note = 2'-O-methyl ribonucleotide
  modified_base 14: mod_base = OTHER; note = 2'-deoxy-2'-fluoro ribonucleotide
  modified_base 15..23: mod_base = OTHER; note = 2'-O-methyl ribonucleotide
  modified_base 1..2: mod_base = OTHER; note = phosphorothioate internucleotide linkage
  modified_base 2..3: mod_base = OTHER; note = phosphorothioate internucleotide linkage
  modified_base 21..22: mod_base = OTHER; note = phosphorothioate internucleotide linkage
  modified_base 22..23: mod_base = OTHER; note = phosphorothioate internucleotide linkage
agttggtgcttcttcagaaggtt

SEQ ID NO: 582 - RNA, 23 nt, Synthetic construct
  source 1..23: mol_type = other RNA
  misc_feature 1: note = monophosphate
  modified_base 1: mod_base = OTHER; note = 2'-O-methyl ribonucleotide
  modified_base 2: mod_base = OTHER; note = 2'-deoxy-2'-fluoro ribonucleotide
  modified_base 3: mod_base = OTHER; note = 2'-O-methyl ribonucleotide
  modified_base 4: mod_base = OTHER; note = 2'-deoxy-2'-fluoro ribonucleotide
  modified_base 5: mod_base = OTHER; note = 2'-O-methyl ribonucleotide
  modified_base 6..7: mod_base = OTHER; note = 2'-deoxy-2'-fluoro ribonucleotide
  modified_base 8..9: mod_base = OTHER; note = 2'-O-methyl ribonucleotide
  modified_base 10: mod_base = OTHER; note = 2'-deoxy-2'-fluoro ribonucleotide
  modified_base 11: mod_base = OTHER; note = 2'-O-methyl ribonucleotide
  modified_base 12: mod_base = OTHER; note = 2'-deoxy-2'-fluoro ribonucleotide
  modified_base 13: mod_base = OTHER; note = 2'-O-methyl ribonucleotide
  modified_base 14: mod_base = OTHER; note = 2'-deoxy-2'-fluoro ribonucleotide
  modified_base 15..23: mod_base = OTHER; note = 2'-O-methyl ribonucleotide
  modified_base 1..2: mod_base = OTHER; note = phosphorothioate internucleotide linkage
  modified_base 2..3: mod_base = OTHER; note = phosphorothioate internucleotide linkage
  modified_base 21..22: mod_base = OTHER; note = phosphorothioate internucleotide linkage
  modified_base 22..23: mod_base = OTHER; note = phosphorothioate internucleotide linkage
agttggtgcttcttcagaaggtt

SEQ ID NO: 583 - RNA, 21 nt, Synthetic construct
  source 1..21: mol_type = other RNA
  modified_base 1: mod_base = OTHER; note = 2'-O-methyl ribonucleotide
  modified_base 2: mod_base = OTHER; note = 2'-deoxy-2'-fluoro ribonucleotide
  modified_base 3: mod_base = OTHER; note = 2'-O-methyl ribonucleotide
  modified_base 4: mod_base = OTHER; note = 2'-deoxy-2'-fluoro ribonucleotide
  modified_base 5: mod_base = OTHER; note = 2'-O-methyl ribonucleotide
  modified_base 6..7: mod_base = OTHER; note = 2'-deoxy-2'-fluoro ribonucleotide
  modified_base 8..11: mod_base = OTHER; note = 2'-O-methyl ribonucleotide
  modified_base 12: mod_base = OTHER; note = 2'-deoxy-2'-fluoro ribonucleotide
  modified_base 13: mod_base = OTHER; note = 2'-O-methyl ribonucleotide
  modified_base 14: mod_base = OTHER; note = 2'-deoxy-2'-fluoro ribonucleotide
  modified_base 15..21: mod_base = OTHER; note = 2'-O-methyl ribonucleotide
  modified_base 1..2: mod_base = OTHER; note = phosphorothioate internucleotide linkage
  modified_base 2..3: mod_base = OTHER; note = phosphorothioate internucleotide linkage
  modified_base 19..20: mod_base = OTHER; note = phosphorothioate internucleotide linkage
  modified_base 20..21: mod_base = OTHER; note = phosphorothioate internucleotide linkage
agttggtgcttcttcagaatt

SEQ ID NO: 584 - RNA, 23 nt, Synthetic construct
  source 1..23: mol_type = other RNA
  modified_base 1: mod_base = OTHER; note = 2'-O-methyl ribonucleotide
  modified_base 2: mod_base = OTHER; note = 2'-deoxy-2'-fluoro ribonucleotide
  modified_base 3: mod_base = OTHER; note = 2'-O-methyl ribonucleotide
  modified_base 4: mod_base = OTHER; note = 2'-deoxy-2'-fluoro ribonucleotide
  modified_base 5: mod_base = OTHER; note = 2'-O-methyl ribonucleotide
  modified_base 6..7: mod_base = OTHER; note = 2'-deoxy-2'-fluoro ribonucleotide
  modified_base 8..11: mod_base = OTHER; note = 2'-O-methyl ribonucleotide
  modified_base 12: mod_base = OTHER; note = 2'-deoxy-2'-fluoro ribonucleotide
  modified_base 13: mod_base = OTHER; note = 2'-O-methyl ribonucleotide
  modified_base 14: mod_base = OTHER; note = 2'-deoxy-2'-fluoro ribonucleotide
  modified_base 15..23: mod_base = OTHER; note = 2'-O-methyl ribonucleotide
  modified_base 1..2: mod_base = OTHER; note = phosphorothioate internucleotide linkage
  modified_base 2..3: mod_base = OTHER; note = phosphorothioate internucleotide linkage
  modified_base 21..22: mod_base = OTHER; note = phosphorothioate internucleotide linkage
  modified_base 22..23: mod_base = OTHER; note = phosphorothioate internucleotide linkage
agttggtgcttcttcagaaggtt

SEQ ID NO: 585 - RNA, 23 nt, Synthetic construct
  source 1..23: mol_type = other RNA
  modified_base 1: mod_base = OTHER; note = 2'-O-methyl ribonucleotide
  modified_base 2: mod_base = OTHER; note = 2'-deoxy-2'-fluoro ribonucleotide
  modified_base 3: mod_base = OTHER; note = 2'-O-methyl ribonucleotide
  modified_base 4: mod_base = OTHER; note = 2'-deoxy-2'-fluoro ribonucleotide
  modified_base 5: mod_base = OTHER; note = 2'-O-methyl ribonucleotide
  modified_base 6..7: mod_base = OTHER; note = 2'-deoxy-2'-fluoro ribonucleotide
  modified_base 8..9: mod_base = OTHER; note = 2'-O-methyl ribonucleotide
  modified_base 10: mod_base = OTHER; note = 2'-deoxy-2'-fluoro ribonucleotide
  modified_base 11: mod_base = OTHER; note = 2'-O-methyl ribonucleotide
  modified_base 12: mod_base = OTHER; note = 2'-deoxy-2'-fluoro ribonucleotide
  modified_base 13: mod_base = OTHER; note = 2'-O-methyl ribonucleotide
  modified_base 14: mod_base = OTHER; note = 2'-deoxy-2'-fluoro ribonucleotide
  modified_base 15..23: mod_base = OTHER; note = 2'-O-methyl ribonucleotide
  modified_base 1..2: mod_base = OTHER; note = phosphorothioate internucleotide linkage
  modified_base 2..3: mod_base = OTHER; note = phosphorothioate internucleotide linkage
  modified_base 21..22: mod_base = OTHER; note = phosphorothioate internucleotide linkage
  modified_base 22..23: mod_base = OTHER; note = phosphorothioate internucleotide linkage
agttggtgcttcttcagaaggtt

SEQ ID NO: 586 - RNA, 21 nt, Synthetic construct
  source 1..21: mol_type = other RNA
  misc_feature 1: note = monophosphate
  modified_base 1: mod_base = OTHER; note = 2'-O-methyl ribonucleotide
  modified_base 2: mod_base = OTHER; note = 2'-deoxy-2'-fluoro ribonucleotide
  modified_base 3: mod_base = OTHER; note = 2'-O-methyl ribonucleotide
  modified_base 4: mod_base = OTHER; note = 2'-deoxy-2'-fluoro ribonucleotide
  modified_base 5: mod_base = OTHER; note = 2'-O-methyl ribonucleotide
  modified_base 6..7: mod_base = OTHER; note = 2'-deoxy-2'-fluoro ribonucleotide
  modified_base 8..11: mod_base = OTHER; note = 2'-O-methyl ribonucleotide
  modified_base 12: mod_base = OTHER; note = 2'-deoxy-2'-fluoro ribonucleotide
  modified_base 13: mod_base = OTHER; note = 2'-O-methyl ribonucleotide
  modified_base 14: mod_base = OTHER; note = 2'-deoxy-2'-fluoro ribonucleotide
  modified_base 15: mod_base = OTHER; note = 2'-O-methyl ribonucleotide
  modified_base 16: mod_base = OTHER; note = 2'-deoxy-2'-fluoro ribonucleotide
  modified_base 17: mod_base = OTHER; note = 2'-O-methyl ribonucleotide
  modified_base 18: mod_base = OTHER; note = 2'-deoxy-2'-fluoro ribonucleotide
  modified_base 19: mod_base = OTHER; note = 2'-O-methyl ribonucleotide
  modified_base 20: mod_base = OTHER; note = 2'-deoxy-2'-fluoro ribonucleotide
  modified_base 21: mod_base = OTHER; note = 2'-O-methyl ribonucleotide
  modified_base 1..2: mod_base = OTHER; note = phosphorothioate internucleotide linkage
  modified_base 2..3: mod_base = OTHER; note = phosphorothioate internucleotide linkage
  modified_base 19..20: mod_base = OTHER; note = phosphorothioate internucleotide linkage
  modified_base 20..21: mod_base = OTHER; note = phosphorothioate internucleotide linkage
tcagttggtgcttcttcagtt

SEQ ID NO: 587 - RNA, 21 nt, Synthetic construct
  source 1..21: mol_type = other RNA
  misc_feature 1: note = monophosphate
  modified_base 1: mod_base = OTHER; note = 2'-O-methyl ribonucleotide
  modified_base 2: mod_base = OTHER; note = 2'-deoxy-2'-fluoro ribonucleotide
  modified_base 3: mod_base = OTHER; note = 2'-O-methyl ribonucleotide
  modified_base 4: mod_base = OTHER; note = 2'-deoxy-2'-fluoro ribonucleotide
  modified_base 5: mod_base = OTHER; note = 2'-O-methyl ribonucleotide
  modified_base 6..7: mod_base = OTHER; note = 2'-deoxy-2'-fluoro ribonucleotide
  modified_base 8..11: mod_base = OTHER; note = 2'-O-methyl ribonucleotide
  modified_base 12: mod_base = OTHER; note = 2'-deoxy-2'-fluoro ribonucleotide
  modified_base 13: mod_base = OTHER; note = 2'-O-methyl ribonucleotide
  modified_base 14: mod_base = OTHER; note = 2'-deoxy-2'-fluoro ribonucleotide
  modified_base 15..21: mod_base = OTHER; note = 2'-O-methyl ribonucleotide
  modified_base 1..2: mod_base = OTHER; note = phosphorothioate internucleotide linkage
  modified_base 2..3: mod_base = OTHER; note = phosphorothioate internucleotide linkage
  modified_base 19..20: mod_base = OTHER; note = phosphorothioate internucleotide linkage
  modified_base 20..21: mod_base = OTHER; note = phosphorothioate internucleotide linkage
actgttttcagttggtgcttt

SEQ ID NO: 588 - RNA, 23 nt, Synthetic construct
  source 1..23: mol_type = other RNA
  modified_base 1: mod_base = OTHER; note = 2'-O-methyl ribonucleotide
  modified_base 2: mod_base = OTHER; note = 2'-deoxy-2'-fluoro ribonucleotide
  modified_base 3: mod_base = OTHER; note = 2'-O-methyl ribonucleotide
  modified_base 4: mod_base = OTHER; note = 2'-deoxy-2'-fluoro ribonucleotide
  modified_base 5: mod_base = OTHER; note = 2'-O-methyl ribonucleotide
  modified_base 6..7: mod_base = OTHER; note = 2'-deoxy-2'-fluoro ribonucleotide
  modified_base 8..11: mod_base = OTHER; note = 2'-O-methyl ribonucleotide
  modified_base 12: mod_base = OTHER; note = 2'-deoxy-2'-fluoro ribonucleotide
  modified_base 13: mod_base = OTHER; note = 2'-O-methyl ribonucleotide
  modified_base 14: mod_base = OTHER; note = 2'-deoxy-2'-fluoro ribonucleotide
  modified_base 15..23: mod_base = OTHER; note = 2'-O-methyl ribonucleotide
  modified_base 1..2: mod_base = OTHER; note = phosphorothioate internucleotide linkage
  modified_base 2..3: mod_base = OTHER; note = phosphorothioate internucleotide linkage
  modified_base 21..22: mod_base = OTHER; note = phosphorothioate internucleotide linkage
  modified_base 22..23: mod_base = OTHER; note = phosphorothioate internucleotide linkage
actgttttcagttggtgcttctt

SEQ ID NO: 589 - RNA, 21 nt, Synthetic construct
  source 1..21: mol_type = other RNA
  misc_feature 1: note = monophosphate
  modified_base 1: mod_base = OTHER; note = 2'-O-methyl ribonucleotide
  modified_base 2: mod_base = OTHER; note = 2'-deoxy-2'-fluoro ribonucleotide
  modified_base 3: mod_base = OTHER; note = 2'-O-methyl ribonucleotide
  modified_base 4: mod_base = OTHER; note = 2'-deoxy-2'-fluoro ribonucleotide
  modified_base 5: mod_base = OTHER; note = 2'-O-methyl ribonucleotide
  modified_base 6..7: mod_base = OTHER; note = 2'-deoxy-2'-fluoro ribonucleotide
  modified_base 8..11: mod_base = OTHER; note = 2'-O-methyl ribonucleotide
  modified_base 12: mod_base = OTHER; note = 2'-deoxy-2'-fluoro ribonucleotide
  modified_base 13: mod_base = OTHER; note = 2'-O-methyl ribonucleotide
  modified_base 14: mod_base = OTHER; note = 2'-deoxy-2'-fluoro ribonucleotide
  modified_base 15..21: mod_base = OTHER; note = 2'-O-methyl ribonucleotide
  modified_base 1..2: mod_base = OTHER; note = phosphorothioate internucleotide linkage
  modified_base 2..3: mod_base = OTHER; note = phosphorothioate internucleotide linkage
  modified_base 19..20: mod_base = OTHER; note = phosphorothioate internucleotide linkage
  modified_base 20..21: mod_base = OTHER; note = phosphorothioate internucleotide linkage
ttctgtgcttggaaccgggtt

SEQ ID NO: 590 - RNA, 21 nt, Synthetic construct
  source 1..21: mol_type = other RNA
  misc_feature 1: note = monophosphate
  modified_base 1: mod_base = OTHER; note = 2'-O-methyl ribonucleotide
  modified_base 2: mod_base = OTHER; note = 2'-deoxy-2'-fluoro ribonucleotide
  modified_base 3: mod_base = OTHER; note = 2'-O-methyl ribonucleotide
  modified_base 4: mod_base = OTHER; note = 2'-deoxy-2'-fluoro ribonucleotide
  modified_base 5: mod_base = OTHER; note = 2'-O-methyl ribonucleotide
  modified_base 6..7: mod_base = OTHER; note = 2'-deoxy-2'-fluoro ribonucleotide
  modified_base 8..11: mod_base = OTHER; note = 2'-O-methyl ribonucleotide
  modified_base 12: mod_base = OTHER; note = 2'-deoxy-2'-fluoro ribonucleotide
  modified_base 13: mod_base = OTHER; note = 2'-O-methyl ribonucleotide
  modified_base 14: mod_base = OTHER; note = 2'-deoxy-2'-fluoro ribonucleotide
  modified_base 15..21: mod_base = OTHER; note = 2'-O-methyl ribonucleotide
  modified_base 1..2: mod_base = OTHER; note = phosphorothioate internucleotide linkage
  modified_base 2..3: mod_base = OTHER; note = phosphorothioate internucleotide linkage
  modified_base 19..20: mod_base = OTHER; note = phosphorothioate internucleotide linkage
  modified_base 20..21: mod_base = OTHER; note = phosphorothioate internucleotide linkage
tagaaggagcctctgtgcttt

SEQ ID NO: 591 - RNA, 21 nt, Synthetic construct
  source 1..21: mol_type = other RNA
  misc_feature 1: note = monophosphate
  modified_base 1: mod_base = OTHER; note = 2'-O-methyl ribonucleotide
  modified_base 2: mod_base = OTHER; note = 2'-deoxy-2'-fluoro ribonucleotide
  modified_base 3: mod_base = OTHER; note = 2'-O-methyl ribonucleotide
  modified_base 4: mod_base = OTHER; note = 2'-deoxy-2'-fluoro ribonucleotide
  modified_base 5: mod_base = OTHER; note = 2'-O-methyl ribonucleotide
  modified_base 6..7: mod_base = OTHER; note = 2'-deoxy-2'-fluoro ribonucleotide
  modified_base 8..11: mod_base = OTHER; note = 2'-O-methyl ribonucleotide
  modified_base 12: mod_base = OTHER; note = 2'-deoxy-2'-fluoro ribonucleotide
  modified_base 13: mod_base = OTHER; note = 2'-O-methyl ribonucleotide
  modified_base 14: mod_base = OTHER; note = 2'-deoxy-2'-fluoro ribonucleotide
  modified_base 15..21: mod_base = OTHER; note = 2'-O-methyl ribonucleotide
  modified_base 1..2: mod_base = OTHER; note = phosphorothioate internucleotide linkage
  modified_base 2..3: mod_base = OTHER; note = phosphorothioate internucleotide linkage
  modified_base 19..20: mod_base = OTHER; note = phosphorothioate internucleotide linkage
  modified_base 20..21: mod_base = OTHER; note = phosphorothioate internucleotide linkage
gtggtgcttgttcagaaggtt

SEQ ID NO: 592 - RNA, 21 nt, Synthetic construct
  source 1..21: mol_type = other RNA
  misc_feature 1: note = monophosphate
  modified_base 1: mod_base = OTHER; note = 2'-O-methyl ribonucleotide
  modified_base 2: mod_base = OTHER; note = 2'-deoxy-2'-fluoro ribonucleotide
  modified_base 3: mod_base = OTHER; note = 2'-O-methyl ribonucleotide
  modified_base 4: mod_base = OTHER; note = 2'-deoxy-2'-fluoro ribonucleotide
  modified_base 5: mod_base = OTHER; note = 2'-O-methyl ribonucleotide
  modified_base 6..7: mod_base = OTHER; note = 2'-deoxy-2'-fluoro ribonucleotide
  modified_base 8..11: mod_base = OTHER; note = 2'-O-methyl ribonucleotide
  modified_base 12: mod_base = OTHER; note = 2'-deoxy-2'-fluoro ribonucleotide
  modified_base 13: mod_base = OTHER; note = 2'-O-methyl ribonucleotide
  modified_base 14: mod_base = OTHER; note = 2'-deoxy-2'-fluoro ribonucleotide
  modified_base 15..21: mod_base = OTHER; note = 2'-O-methyl ribonucleotide
  modified_base 1..2: mod_base = OTHER; note = phosphorothioate internucleotide linkage
  modified_base 2..3: mod_base = OTHER; note = phosphorothioate internucleotide linkage
  modified_base 19..20: mod_base = OTHER; note = phosphorothioate internucleotide linkage
  modified_base 20..21: mod_base = OTHER; note = phosphorothioate internucleotide linkage
atggtgcttgttcagaaggtt

SEQ ID NO: 593 - RNA, 21 nt, Synthetic construct
  source 1..21: mol_type = other RNA
  misc_feature 1: note = monophosphate
  modified_base 1: mod_base = OTHER; note = 2'-O-methyl ribonucleotide
  modified_base 2: mod_base = OTHER; note = 2'-deoxy-2'-fluoro ribonucleotide
  modified_base 3: mod_base = OTHER; note = 2'-O-methyl ribonucleotide
  modified_base 4: mod_base = OTHER; note = 2'-deoxy-2'-fluoro ribonucleotide
  modified_base 5: mod_base = OTHER; note = 2'-O-methyl ribonucleotide
  modified_base 6..7: mod_base = OTHER; note = 2'-deoxy-2'-fluoro ribonucleotide
  modified_base 8..11: mod_base = OTHER; note = 2'-O-methyl ribonucleotide
  modified_base 12: mod_base = OTHER; note = 2'-deoxy-2'-fluoro ribonucleotide
  modified_base 13: mod_base = OTHER; note = 2'-O-methyl ribonucleotide
  modified_base 14: mod_base = OTHER; note = 2'-deoxy-2'-fluoro ribonucleotide
  modified_base 15..21: mod_base = OTHER; note = 2'-O-methyl ribonucleotide
  modified_base 1..2: mod_base = OTHER; note = phosphorothioate internucleotide linkage
  modified_base 2..3: mod_base = OTHER; note = phosphorothioate internucleotide linkage
  modified_base 19..20: mod_base = OTHER; note = phosphorothioate internucleotide linkage
  modified_base 20..21: mod_base = OTHER; note = phosphorothioate internucleotide linkage
tacctgattctgtttctgatt

SEQ ID NO: 594 - RNA, 21 nt, Synthetic construct
  source 1..21: mol_type = other RNA
  misc_feature 1: note = monophosphate
  modified_base 1: mod_base = OTHER; note = 2'-O-methyl ribonucleotide
  modified_base 2: mod_base = OTHER; note = 2'-deoxy-2'-fluoro ribonucleotide
  modified_base 3: mod_base = OTHER; note = 2'-O-methyl ribonucleotide
  modified_base 4: mod_base = OTHER; note = 2'-deoxy-2'-fluoro ribonucleotide
  modified_base 5: mod_base = OTHER; note = 2'-O-methyl ribonucleotide
  modified_base 6..7: mod_base = OTHER; note = 2'-deoxy-2'-fluoro ribonucleotide
  modified_base 8..11: mod_base = OTHER; note = 2'-O-methyl ribonucleotide
  modified_base 12: mod_base = OTHER; note = 2'-deoxy-2'-fluoro ribonucleotide
  modified_base 13: mod_base = OTHER; note = 2'-O-methyl ribonucleotide
  modified_base 14: mod_base = OTHER; note = 2'-deoxy-2'-fluoro ribonucleotide
  modified_base 15..21: mod_base = OTHER; note = 2'-O-methyl ribonucleotide
  modified_base 1..2: mod_base = OTHER; note = phosphorothioate internucleotide linkage
  modified_base 2..3: mod_base = OTHER; note = phosphorothioate internucleotide linkage
  modified_base 19..20: mod_base = OTHER; note = phosphorothioate internucleotide linkage
  modified_base 20..21: mod_base = OTHER; note = phosphorothioate internucleotide linkage
tctaggacacctgattctgtt

SEQ ID NO: 595 - RNA, 21 nt, Synthetic construct
  source 1..21: mol_type = other RNA
  misc_feature 1: note = monophosphate
  modified_base 1: mod_base = OTHER; note = 2'-O-methyl ribonucleotide
  modified_base 2: mod_base = OTHER; note = 2'-deoxy-2'-fluoro ribonucleotide
  modified_base 3: mod_base = OTHER; note = 2'-O-methyl ribonucleotide
  modified_base 4: mod_base = OTHER; note = 2'-deoxy-2'-fluoro ribonucleotide
  modified_base 5: mod_base = OTHER; note = 2'-O-methyl ribonucleotide
  modified_base 6..7: mod_base = OTHER; note = 2'-deoxy-2'-fluoro ribonucleotide
  modified_base 8..11: mod_base = OTHER; note = 2'-O-methyl ribonucleotide
  modified_base 12: mod_base = OTHER; note = 2'-deoxy-2'-fluoro ribonucleotide
  modified_base 13: mod_base = OTHER; note = 2'-O-methyl ribonucleotide
  modified_base 14: mod_base = OTHER; note = 2'-deoxy-2'-fluoro ribonucleotide
  modified_base 15..21: mod_base = OTHER; note = 2'-O-methyl ribonucleotide
  modified_base 1..2: mod_base = OTHER; note = phosphorothioate internucleotide linkage
  modified_base 2..3: mod_base = OTHER; note = phosphorothioate internucleotide linkage
  modified_base 19..20: mod_base = OTHER; note = phosphorothioate internucleotide linkage
  modified_base 20..21: mod_base = OTHER; note = phosphorothioate internucleotide linkage
aagaatgtgcctcgataactt

SEQ ID NO: 596 - RNA, 21 nt, Synthetic construct
  source 1..21: mol_type = other RNA
  misc_feature 1: note = monophosphate
  modified_base 1: mod_base = OTHER; note = 2'-O-methyl ribonucleotide
  modified_base 2: mod_base = OTHER; note = 2'-deoxy-2'-fluoro ribonucleotide
  modified_base 3: mod_base = OTHER; note = 2'-O-methyl ribonucleotide
  modified_base 4: mod_base = OTHER; note = 2'-deoxy-2'-fluoro ribonucleotide
  modified_base 5: mod_base = OTHER; note = 2'-O-methyl ribonucleotide
  modified_base 6..7: mod_base = OTHER; note = 2'-deoxy-2'-fluoro ribonucleotide
  modified_base 8..11: mod_base = OTHER; note = 2'-O-methyl ribonucleotide
  modified_base 12: mod_base = OTHER; note = 2'-deoxy-2'-fluoro ribonucleotide
  modified_base 13: mod_base = OTHER; note = 2'-O-methyl ribonucleotide
  modified_base 14: mod_base = OTHER; note = 2'-deoxy-2'-fluoro ribonucleotide
  modified_base 15..21: mod_base = OTHER; note = 2'-O-methyl ribonucleotide
  modified_base 1..2: mod_base = OTHER; note = phosphorothioate internucleotide linkage
  modified_base 2..3: mod_base = OTHER; note = phosphorothioate internucleotide linkage
  modified_base 19..20: mod_base = OTHER; note = phosphorothioate internucleotide linkage
  modified_base 20..21: mod_base = OTHER; note = phosphorothioate internucleotide linkage
ggagaatgtgcctcgataatt

SEQ ID NO: 597 - RNA, 21 nt, Synthetic construct
  source 1..21: mol_type = other RNA
  misc_feature 1: note = monophosphate
  modified_base 1: mod_base = OTHER; note = 2'-O-methyl ribonucleotide
  modified_base 2: mod_base = OTHER; note = 2'-deoxy-2'-fluoro ribonucleotide
  modified_base 3: mod_base = OTHER; note = 2'-O-methyl ribonucleotide
  modified_base 4: mod_base = OTHER; note = 2'-deoxy-2'-fluoro ribonucleotide
  modified_base 5: mod_base = OTHER; note = 2'-O-methyl ribonucleotide
  modified_base 6..7: mod_base = OTHER; note = 2'-deoxy-2'-fluoro ribonucleotide
  modified_base 8..11: mod_base = OTHER; note = 2'-O-methyl ribonucleotide
  modified_base 12: mod_base = OTHER; note = 2'-deoxy-2'-fluoro ribonucleotide
  modified_base 13: mod_base = OTHER; note = 2'-O-methyl ribonucleotide
  modified_base 14: mod_base = OTHER; note = 2'-deoxy-2'-fluoro ribonucleotide
  modified_base 15..21: mod_base = OTHER; note = 2'-O-methyl ribonucleotide
  modified_base 1..2: mod_base = OTHER; note = phosphorothioate internucleotide linkage
  modified_base 2..3: mod_base = OTHER; note = phosphorothioate internucleotide linkage
  modified_base 19..20: mod_base = OTHER; note = phosphorothioate internucleotide linkage
  modified_base 20..21: mod_base = OTHER; note = phosphorothioate internucleotide linkage
agagaatgtgcctcgataatt

SEQ ID NO: 598 - RNA, 21 nt, Synthetic construct
  source 1..21: mol_type = other RNA
  misc_feature 1: note = monophosphate
  modified_base 1: mod_base = OTHER; note = 2'-O-methyl ribonucleotide
  modified_base 2: mod_base = OTHER; note = 2'-deoxy-2'-fluoro ribonucleotide
  modified_base 3: mod_base = OTHER; note = 2'-O-methyl ribonucleotide
  modified_base 4: mod_base = OTHER; note = 2'-deoxy-2'-fluoro ribonucleotide
  modified_base 5: mod_base = OTHER; note = 2'-O-methyl ribonucleotide
  modified_base 6..7: mod_base = OTHER; note = 2'-deoxy-2'-fluoro ribonucleotide
  modified_base 8..11: mod_base = OTHER; note = 2'-O-methyl ribonucleotide
  modified_base 12: mod_base = OTHER; note = 2'-deoxy-2'-fluoro ribonucleotide
  modified_base 13: mod_base = OTHER; note = 2'-O-methyl ribonucleotide
  modified_base 14: mod_base = OTHER; note = 2'-deoxy-2'-fluoro ribonucleotide
  modified_base 15..21: mod_base = OTHER; note = 2'-O-methyl ribonucleotide
  modified_base 1..2: mod_base = OTHER; note = phosphorothioate internucleotide linkage
  modified_base 2..3: mod_base = OTHER; note = phosphorothioate internucleotide linkage
  modified_base 19..20: mod_base = OTHER; note = phosphorothioate internucleotide linkage
  modified_base 20..21: mod_base = OTHER; note = phosphorothioate internucleotide linkage
ttgtgtctgagcatcgcgttt

SEQ ID NO: 599 - RNA, 21 nt, Synthetic construct
  source 1..21: mol_type = other RNA
  misc_feature 1: note = monophosphate
  modified_base 1: mod_base = OTHER; note = 2'-O-methyl ribonucleotide
  modified_base 2: mod_base = OTHER; note = 2'-deoxy-2'-fluoro ribonucleotide
  modified_base 3: mod_base = OTHER; note = 2'-O-methyl ribonucleotide
  modified_base 4: mod_base = OTHER; note = 2'-deoxy-2'-fluoro ribonucleotide
  modified_base 5: mod_base = OTHER; note = 2'-O-methyl ribonucleotide
  modified_base 6..7: mod_base = OTHER; note = 2'-deoxy-2'-fluoro ribonucleotide
  modified_base 8..11: mod_base = OTHER; note = 2'-O-methyl ribonucleotide
  modified_base 12: mod_base = OTHER; note = 2'-deoxy-2'-fluoro ribonucleotide
  modified_base 13: mod_base = OTHER; note = 2'-O-methyl ribonucleotide
  modified_base 14: mod_base = OTHER; note = 2'-deoxy-2'-fluoro ribonucleotide
  modified_base 15..21: mod_base = OTHER; note = 2'-O-methyl ribonucleotide
  modified_base 1..2: mod_base = OTHER; note = phosphorothioate internucleotide linkage
  modified_base 2..3: mod_base = OTHER; note = phosphorothioate internucleotide linkage
  modified_base 19..20: mod_base = OTHER; note = phosphorothioate internucleotide linkage
  modified_base 20..21: mod_base = OTHER; note = phosphorothioate internucleotide linkage
tacagtcccttctgtgtcttt

SEQ ID NO: 600 - RNA, 21 nt, Synthetic construct
  source 1..21: mol_type = other RNA
  misc_feature 1: note = monophosphate
  modified_base 1: mod_base = OTHER; note = 2'-O-methyl ribonucleotide
  modified_base 2: mod_base = OTHER; note = 2'-deoxy-2'-fluoro ribonucleotide
  modified_base 3: mod_base = OTHER; note = 2'-O-methyl ribonucleotide
  modified_base 4: mod_base = OTHER; note = 2'-deoxy-2'-fluoro ribonucleotide
  modified_base 5: mod_base = OTHER; note = 2'-O-methyl ribonucleotide
  modified_base 6..7: mod_base = OTHER; note = 2'-deoxy-2'-fluoro ribonucleotide
  modified_base 8..11: mod_base = OTHER; note = 2'-O-methyl ribonucleotide
  modified_base 12: mod_base = OTHER; note = 2'-deoxy-2'-fluoro ribonucleotide
  modified_base 13: mod_base = OTHER; note = 2'-O-methyl ribonucleotide
  modified_base 14: mod_base = OTHER; note = 2'-deoxy-2'-fluoro ribonucleotide
  modified_base 15..21: mod_base = OTHER; note = 2'-O-methyl ribonucleotide
  modified_base 1..2: mod_base = OTHER; note = phosphorothioate internucleotide linkage
  modified_base 2..3: mod_base = OTHER; note = phosphorothioate internucleotide linkage
  modified_base 19..20: mod_base = OTHER; note = phosphorothioate internucleotide linkage
  modified_base 20..21: mod_base = OTHER; note = phosphorothioate internucleotide linkage
ttacaatgcttccaggacatt

SEQ ID NO: 601 - RNA, 21 nt, Synthetic construct
  source 1..21: mol_type = other RNA
  misc_feature 1: note = monophosphate
  modified_base 1: mod_base = OTHER; note = 2'-O-methyl ribonucleotide
  modified_base 2: mod_base = OTHER; note = 2'-deoxy-2'-fluoro ribonucleotide
  modified_base 3: mod_base = OTHER; note = 2'-O-methyl ribonucleotide
  modified_base 4: mod_base = OTHER; note = 2'-deoxy-2'-fluoro ribonucleotide
  modified_base 5: mod_base = OTHER; note = 2'-O-methyl ribonucleotide
  modified_base 6..7: mod_base = OTHER; note = 2'-deoxy-2'-fluoro ribonucleotide
  modified_base 8..11: mod_base = OTHER; note = 2'-O-methyl ribonucleotide
  modified_base 12: mod_base = OTHER; note = 2'-deoxy-2'-fluoro ribonucleotide
  modified_base 13: mod_base = OTHER; note = 2'-O-methyl ribonucleotide
  modified_base 14: mod_base = OTHER; note = 2'-deoxy-2'-fluoro ribonucleotide
  modified_base 15..21: mod_base = OTHER; note = 2'-O-methyl ribonucleotide
  modified_base 1..2: mod_base = OTHER; note = phosphorothioate internucleotide linkage
  modified_base 2..3: mod_base = OTHER; note = phosphorothioate internucleotide linkage
  modified_base 19..20: mod_base = OTHER; note = phosphorothioate internucleotide linkage
  modified_base 20..21: mod_base = OTHER; note = phosphorothioate internucleotide linkage
atgctttccaaaccttgtttt

SEQ ID NO: 602 - DNA, 24 bp, Synthetic construct
  source 1..24: mol_type = other DNA
caaaatggaacataaggaagtggt

SEQ ID NO: 603 - DNA, 19 bp, Synthetic construct
  source 1..19: mol_type = other DNA
gtgacagtggtggagtacg

SEQ ID NO: 604 - skipped

SEQ ID NO: 605 - DNA, 13 bp, Synthetic construct
  source 1..13: mol_type = other DNA
gctcaggtgctgc

SEQ ID NO: 606 - DNA, 18 bp, Synthetic construct
  source 1..18: mol_type = other DNA
atgacccccatcactcct

SEQ ID NO: 607 - DNA, 25 bp, Synthetic construct
  source 1..25: mol_type = other DNA
tcaagtttacaaccaagattcactg

SEQ ID NO: 608 - skipped

SEQ ID NO: 609 - DNA, 15 bp, Synthetic construct
  source 1..15: mol_type = other DNA
acaatcccagaactc

SEQ ID NO: 610 - RNA, 20 nt, Synthetic construct
  source 1..20: mol_type = other RNA
cgcccttggtgttacaccat

SEQ ID NO: 611 - RNA, 21 nt, Synthetic construct
  source 1..21: mol_type = other RNA
tggtgtaacaccaagggcgaa

SEQ ID NO: 612 - RNA, 21 nt, Synthetic construct
  source 1..21: mol_type = other RNA
  misc_feature 1: note = GalNAc3
  misc_feature 21: note = invAb
  modified_base 1..6: mod_base = OTHER; note = 2'-O-methyl ribonucleotide
  modified_base 7: mod_base = OTHER; note = 2'-deoxy-2'-fluoro ribonucleotide
  modified_base 8: mod_base = OTHER; note = 2'-O-methyl ribonucleotide
  modified_base 9: mod_base = OTHER; note = 2'-deoxy-2'-fluoro ribonucleotide
  modified_base 10: mod_base = OTHER; note = 2'-O-methyl ribonucleotide
  modified_base 11..12: mod_base = OTHER; note = 2'-deoxy-2'-fluoro ribonucleotide
  modified_base 13..20: mod_base = OTHER; note = 2'-O-methyl ribonucleotide
  modified_base 1: mod_base = OTHER; note = phosphorothioate internucleotide linkage
  modified_base 20..21: mod_base = OTHER; note = phosphorothioate internucleotide linkage
cgcccttggtgttacaccatn

SEQ ID NO: 613 - RNA, 21 nt, Synthetic construct
  source 1..21: mol_type = other RNA
  misc_feature 1: note = GalNAc3
  misc_feature 21: note = invAb
  modified_base 1..6: mod_base = OTHER; note = 2'-O-methyl ribonucleotide
  modified_base 7: mod_base = OTHER; note = 2'-deoxy-2'-fluoro ribonucleotide
  modified_base 8: mod_base = OTHER; note = 2'-O-methyl ribonucleotide
  modified_base 9: mod_base = OTHER; note = 2'-deoxy-2'-fluoro ribonucleotide
  modified_base 10: mod_base = OTHER; note = 2'-O-methyl ribonucleotide
  modified_base 11..12: mod_base = OTHER; note = 2'-deoxy-2'-fluoro ribonucleotide
  modified_base 13..20: mod_base = OTHER; note = 2'-O-methyl ribonucleotide
  modified_base 1: mod_base = OTHER; note = phosphorothioate internucleotide linkage
  modified_base 20..21: mod_base = OTHER; note = phosphorothioate internucleotide linkage
ttcgcccttggtgttacaccn

SEQ ID NO: 614 - RNA, 19 nt, Synthetic construct
  source 1..19: mol_type = other RNA
  misc_feature 1: note = GalNAc3
  misc_feature 19: note = invAb
  modified_base 1..6: mod_base = OTHER; note = 2'-O-methyl ribonucleotide
  modified_base 7: mod_base = OTHER; note = 2'-deoxy-2'-fluoro ribonucleotide
  modified_base 8: mod_base = OTHER; note = 2'-O-methyl ribonucleotide
  modified_base 9..10: mod_base = OTHER; note = 2'-deoxy-2'-fluoro ribonucleotide
  modified_base 11..18: mod_base = OTHER; note = 2'-O-methyl ribonucleotide
  modified_base 1: mod_base = OTHER; note = phosphorothioate internucleotide linkage
  modified_base 18..19: mod_base = OTHER; note = phosphorothioate internucleotide linkage
cgcccttggtgttacaccn

SEQ ID NO: 615 - RNA, 21 nt, Synthetic construct
  source 1..21: mol_type = other RNA
  misc_feature 1: note = GalNAc3
  misc_feature 21: note = invAb
  modified_base 1..8: mod_base = OTHER; note = 2'-O-methyl ribonucleotide
  modified_base 9..12: mod_base = OTHER; note = 2'-deoxy-2'-fluoro ribonucleotide
  modified_base 13..20: mod_base = OTHER; note = 2'-O-methyl ribonucleotide
  modified_base 1: mod_base = OTHER; note = phosphorothioate internucleotide linkage
  modified_base 20..21: mod_base = OTHER; note = phosphorothioate internucleotide linkage
ttcgcccttggtgttacaccn

SEQ ID NO: 616 - RNA, 21 nt, Synthetic construct
  source 1..21: mol_type = other RNA
  misc_feature 1: note = GalNAc3
  misc_feature 21: note = invAb
  modified_base 1..8: mod_base = OTHER; note = 2'-O-methyl ribonucleotide
  modified_base 9: mod_base = OTHER; note = 2'-deoxy-2'-fluoro ribonucleotide
  modified_base 10: mod_base = OTHER; note = 2'-O-methyl ribonucleotide
  modified_base 11..14: mod_base = OTHER; note = 2'-deoxy-2'-fluoro ribonucleotide
  modified_base 15..20: mod_base = OTHER; note = 2'-O-methyl ribonucleotide
  modified_base 1: mod_base = OTHER; note = phosphorothioate internucleotide linkage
  modified_base 20..21: mod_base = OTHER; note = phosphorothioate internucleotide linkage
ttcgcccttggtgttacaccn

SEQ ID NO: 617 - RNA, 23 nt, Synthetic construct
  source 1..23: mol_type = other RNA
  modified_base 1: mod_base = OTHER; note = 2'-O-methyl ribonucleotide
  modified_base 2: mod_base = OTHER; note = 2'-deoxy-2'-fluoro ribonucleotide
  modified_base 3..6: mod_base = OTHER; note = 2'-O-methyl ribonucleotide
  modified_base 7: mod_base = OTHER; note = 2'-deoxy-2'-fluoro ribonucleotide
  modified_base 8..11: mod_base = OTHER; note = 2'-O-methyl ribonucleotide
  modified_base 12: mod_base = OTHER; note = 2'-deoxy-2'-fluoro ribonucleotide
  modified_base 13: mod_base = OTHER; note = 2'-O-methyl ribonucleotide
  modified_base 14: mod_base = OTHER; note = 2'-deoxy-2'-fluoro ribonucleotide
  modified_base 15: mod_base = OTHER; note = 2'-O-methyl ribonucleotide
  modified_base 16: mod_base = OTHER; note = 2'-deoxy-2'-fluoro ribonucleotide
  modified_base 17..23: mod_base = OTHER; note = 2'-O-methyl ribonucleotide
  modified_base 1..2: mod_base = OTHER; note = phosphorothioate internucleotide linkage
  modified_base 2..3: mod_base = OTHER; note = phosphorothioate internucleotide linkage
  modified_base 21..22: mod_base = OTHER; note = phosphorothioate internucleotide linkage
  modified_base 22..23: mod_base = OTHER; note = phosphorothioate internucleotide linkage
tggtgtaacaccaagggcgaatt

SEQ ID NO: 618 - RNA, 21 nt, Synthetic construct
  source 1..21: mol_type = other RNA
  modified_base 1: mod_base = OTHER; note = 2'-O-methyl ribonucleotide
  modified_base 2: mod_base = OTHER; note = 2'-deoxy-2'-fluoro ribonucleotide
  modified_base 3..6: mod_base = OTHER; note = 2'-O-methyl ribonucleotide
  modified_base 7: mod_base = OTHER; note = 2'-deoxy-2'-fluoro ribonucleotide
  modified_base 8..11: mod_base = OTHER; note = 2'-O-methyl ribonucleotide
  modified_base 12: mod_base = OTHER; note = 2'-deoxy-2'-fluoro ribonucleotide
  modified_base 13: mod_base = OTHER; note = 2'-O-methyl ribonucleotide
  modified_base 14: mod_base = OTHER; note = 2'-deoxy-2'-fluoro ribonucleotide
  modified_base 15: mod_base = OTHER; note = 2'-O-methyl ribonucleotide
  modified_base 16: mod_base = OTHER; note = 2'-deoxy-2'-fluoro ribonucleotide
  modified_base 17..21: mod_base = OTHER; note = 2'-O-methyl ribonucleotide
  modified_base 1..2: mod_base = OTHER; note = phosphorothioate internucleotide linkage
  modified_base 2..3: mod_base = OTHER; note = phosphorothioate internucleotide linkage
  modified_base 19..20: mod_base = OTHER; note = phosphorothioate internucleotide linkage
  modified_base 20..21: mod_base = OTHER; note = phosphorothioate internucleotide linkage
tggtgtaacaccaagggcgtt

SEQ ID NO: 619 - RNA, 21 nt, Synthetic construct
  source 1..21: mol_type = other RNA
  modified_base 1: mod_base = OTHER; note = 2'-O-methyl ribonucleotide
  modified_base 2: mod_base = OTHER; note = 2'-deoxy-2'-fluoro ribonucleotide
  modified_base 3..6: mod_base = OTHER; note = 2'-O-methyl ribonucleotide
  modified_base 7: mod_base = OTHER; note = 2'-deoxy-2'-fluoro ribonucleotide
  modified_base 8..11: mod_base = OTHER; note = 2'-O-methyl ribonucleotide
  modified_base 12: mod_base = OTHER; note = 2'-deoxy-2'-fluoro ribonucleotide
  modified_base 13: mod_base = OTHER; note = 2'-O-methyl ribonucleotide
  modified_base 14: mod_base = OTHER; note = 2'-deoxy-2'-fluoro ribonucleotide
  modified_base 15..21: mod_base = OTHER; note = 2'-O-methyl ribonucleotide
  modified_base 1..2: mod_base = OTHER; note = phosphorothioate internucleotide linkage
  modified_base 2..3: mod_base = OTHER; note = phosphorothioate internucleotide linkage
  modified_base 19..20: mod_base = OTHER; note = phosphorothioate internucleotide linkage
  modified_base 20..21: mod_base = OTHER; note = phosphorothioate internucleotide linkage
tggtgtaacaccaagggcgaa

SEQ ID NO: 620 - RNA, 20 nt, Synthetic construct
  source 1..20: mol_type = other RNA
  misc_feature 20: note = inverted deoxyadenosine
  modified_base 1..8: mod_base = OTHER; note = 2'-O-methyl ribonucleotide
  modified_base 9..11: mod_base = OTHER; note = 2'-deoxy-2'-fluoro ribonucleotide
  modified_base 12..20: mod_base = OTHER; note = 2'-O-methyl ribonucleotide
  modified_base 1..2: mod_base = OTHER; note = phosphorothioate internucleotide linkage
  modified_base 20: mod_base = OTHER; note = phosphorothioate internucleotide linkage
cagccccttattgttatacg

SEQ ID NO: 621 - RNA, 21 nt, Synthetic construct
  source 1..21: mol_type = other RNA
  modified_base 1: mod_base = OTHER; note = 2'-O-methyl ribonucleotide
  modified_base 2: mod_base = OTHER; note = 2'-deoxy-2'-fluoro ribonucleotide
  modified_base 3: mod_base = OTHER; note = 2'-O-methyl ribonucleotide
  modified_base 4: mod_base = OTHER; note = 2'-deoxy-2'-fluoro ribonucleotide
  modified_base 5: mod_base = OTHER; note = 2'-O-methyl ribonucleotide
  modified_base 6: mod_base = OTHER; note = 2'-deoxy-2'-fluoro ribonucleotide
  modified_base 7..11: mod_base = OTHER; note = 2'-O-methyl ribonucleotide
  modified_base 12: mod_base = OTHER; note = 2'-deoxy-2'-fluoro ribonucleotide
  modified_base 13: mod_base = OTHER; note = 2'-O-methyl ribonucleotide
  modified_base 14: mod_base = OTHER; note = 2'-deoxy-2'-fluoro ribonucleotide
  modified_base 15: mod_base = OTHER; note = 2'-O-methyl ribonucleotide
  modified_base 16: mod_base = OTHER; note = 2'-deoxy-2'-fluoro ribonucleotide
  modified_base 17: mod_base = OTHER; note = 2'-O-methyl ribonucleotide
  modified_base 18: mod_base = OTHER; note = 2'-deoxy-2'-fluoro ribonucleotide
  modified_base 19: mod_base = OTHER; note = 2'-O-methyl ribonucleotide
  modified_base 20: mod_base = OTHER; note = 2'-deoxy-2'-fluoro ribonucleotide
  modified_base 21: mod_base = OTHER; note = 2'-O-methyl ribonucleotide
  modified_base 1..2: mod_base = OTHER; note = phosphorothioate internucleotide linkage
  modified_base 2..3: mod_base = OTHER; note = phosphorothioate internucleotide linkage
  modified_base 19..20: mod_base = OTHER; note = phosphorothioate internucleotide linkage
  modified_base 20..21: mod_base = OTHER; note = phosphorothioate internucleotide linkage
tcgtataacaataaggggctg